(19) United States
(12) Patent Application Publication
(10) Pub. No.: US 2026/0022379 A1
(43) Pub. Date: Jan. 22, 2026

(54) Optimized RNAi Agents for Inhibiting Expression of Coronavirus (CoV) Viral Genomes, Compositions Thereof, and Methods of Use

(71) Applicant: Arrowhead Pharmaceuticals, Inc., Pasadena, CA (US)

(72) Inventors: Casi Schienebeck, Deerfield, WI (US); Zhao Xu, Brookfield, WI (US)

(21) Appl. No.: 19/287,091

(22) Filed: Jul. 31, 2025

Related U.S. Application Data
(63) Continuation of application No. PCT/US24/14020, filed on Feb. 1, 2024.
(60) Provisional application No. 63/482,854, filed on Feb. 2, 2023.

(51) Int. Cl. C12N 15/113; A61P 31/14

(52) U.S. Cl. CPC C12N 15/1131; A61P 31/14; C12N 2310/14; C12N 2310/321; C12N 2310/351

(57) ABSTRACT

Described are optimized RNAi agents, compositions that include RNAi agents, and methods for inhibition of coronavirus (CoV) viral genome. The optimized CoV RNAi agents and RNAi agent conjugates disclosed herein inhibit the expression of a SARS-CoV-2 viral genome, and the targeted portions of the genome are conserved across a variety of known coronaviruses. Pharmaceutical compositions that include one or more optimized CoV RNAi agents, optionally with one or more additional therapeutics, are also described. Delivery of the described CoV RNAi agents to pulmonary cells, in vivo, provides for inhibition of CoV viral genome expression, including SARS-CoV-2, which can provide a therapeutic benefit to subjects, including human subjects, for the treatment of various diseases including COVID-19.

### CROSS REFERENCE TO RELATED APPLICATIONS

[0001] This application is a continuation application of International Application No. PCT/US2024/014020, filed Feb. 1, 2024, which claims the benefit of priority of U.S. Provisional Patent Application Ser. No. 63/482,954, filed on Feb. 2, 2023, the contents of which are incorporated herein by reference in their entirety.

### SEQUENCE LISTING

[0002] This application contains a Sequence Listing (in compliance with Standard ST26), which has been submitted in xml format and is hereby incorporated by reference in its entirety. The xml sequence listing file is named 30721-US1_SeqListing.xml, created Jul. 30, 2025, and is 4,965,983 bytes in size.

### FIELD OF THE INVENTION

[0003] The present disclosure relates to optimized RNA interference (RNAi) agents, e.g., double stranded RNAi agents, for inhibition of coronavirus (“CoV”) viral genome expression, including severe acute respiratory syndrome coronavirus 2 (SARS-COV-2), compositions that include CoV RNAi agents, and methods of use thereof.

### BACKGROUND

[0004] Coronaviruses (CoVs) are a large family of single-stranded RNA viruses capable of infecting animals including humans, and causing respiratory, gastrointestinal, hepatic, and neurologic diseases (Weiss and Leibowitz, Adv Virus Res 81:85-164 (2011)). There currently exist six identified human coronaviruses: two alpha-CoVs (HCoVs-NL63 and HCoVs-229E), two beta-CoVs (HCoVs-OC43 and HCoVs-HKU1), severe acute respiratory syndrome-CoV (SARS-CoV), and Middle East respiratory syndrome-CoV (MERS-CoV) (Wu et al, Int J Infect Dis 94:44-48 (2020)). The symptoms of CoVs vary from mild ailments similar to what is caused by the common cold with a fever, sneezing, cough, sore throat, or runny nose, to very severe cases of pneumonia and even death.

[0005] In December 2019, a contagious disease caused by severe acute respiratory syndrome coronavirus 2 (SARS-CoV-2), named Coronavirus Disease 2019 (COVID-19) was identified in Wuhan, China. SARS-CoV-2 is a positive-sense single stranded RNA (+ssRNA) virus. COVID-19 subsequently spread worldwide causing a global pandemic.

[0006] While highly effective vaccines against SARS-CoV-2 have since been identified that are capable of reducing severe outcomes in most subjects, breakthrough infections of vaccinated individuals still occur and the duration and extent of protection provided by the vaccines appears to wane over time, necessitating recurring booster vaccinations. Further, while certain small molecules, antibodies, and other alternative treatments have been shown at least anecdotally to alleviate symptoms of symptomatic COVID-19 infected individuals, in many cases the mechanisms of action remain scientifically controversial and none has been accepted universally as a sufficient therapeutic. Moreover, it is unknown what extent any of these alternative treatments may be successful at treating future CoV-related diseases.

[0007] Utilizing RNA interference to silence a viral genome has been successfully employed in humans and animals against, for example, the hepatitis B virus (HBV), and it is plausible that a similar approach can inhibit SARS-CoV-2 replication. However, to date, others have failed to design an RNAi agent that can provide advantages over the existing vaccines and alternative treatment options for patients (see, e.g., https://investors.alnylam.com/press-release?id=25901, 3 Aug. 2021 Press Release Announcing Discontinuation of RNA interference ALN-COV program “based on availability of highly effective vaccines and alternative treatment options” (last visited 30 Jan. 2023)). Thus, there remains a need for a therapeutic that can silence viral genomes of SARS-CoV-2, and in particular an RNAi agent with the potential to inhibit the replication of other CoV genomes beyond SARS-CoV-2 that may arise in the future.

[0008] While in vitro screening of potentially active sequences that are complementary to a known gene or genome being targeted is routine, the lack of a reliable correlation between in vitro data and in vivo activity frequently renders this screening exercise incomplete and potentially misleading, as often the most potent RNAi agent sequences in vivo are not always the most active performers in vitro. (See, e.g., D. Pascut et al., Biosci Rep. 35(2) (2015) (“In other words, the siRNA-mRNA target features involved in siRNA efficacy extracted from data that have small sample size and unique experimental settings (i.e. a set of siRNA against the same target or a restrict number of targets) are likely to perform unsatisfactorily when applied on large datasets under different experimental settings. In vitro experiments could not accurately represent the dynamic setting encountered in vivo.”)). Further, such screening fails to account for potential and unintended off-target effects, which can only be confirmed by in vivo exploration and confirmation. (See, e.g., P. Kamola et al., PLOS Computational Biology 11(12) (2015) (“While high on-target knockdown is essential, it is important to address the problem of unintended off-target effects”).

[0009] To be useful as a therapeutic against SARS-CoV-2 and potentially other future CoV outbreaks, the CoV RNAi agent must be able to silence highly conserved sequences in essential RNAs. Thus, identifying a highly-specific and conserved nucleotide sequence for an RNAi agent against CoV genomes (and specifically including a SARS-CoV-2 genome) that is proven to be capable of being delivered in vivo to the lung tissues and can provide highly potent and durable genome knockdown with minimal off-target effects is a significant challenge, but is required for the discovery of a useful RNAi agent therapeutic against CoV.

### SUMMARY

[0010] There exists a need for novel RNA interference (RNAi) agents (termed RNAi agents, RNAi triggers, or triggers), e.g., double stranded RNAi agents, that are able to selectively and efficiently inhibit the expression of CoV viral genomes, including but not limited to selectively and efficiently inhibiting the expression and thus the replication of SARS-CoV-2. Further, there exists a need for compositions of novel CoV-specific RNAi agents for use as a therapeutic or medicament for the treatment of COVID-19 and/or diseases or disorders that can be mediated at least in part by a reduction in CoV viral genome expression.

[0011] The chemically modified nucleotide sequences of the CoV RNAi agents disclosed and claimed herein, as well as their combination with certain specific targeting ligands suitable for selectively and efficiently delivering the CoV RNAi agents to pulmonary cells in vivo, differ from those previously disclosed or known in the art. The CoV RNAi agents disclosed herein provide for highly potent and efficient in vivo inhibition of the expression of a SARS-CoV-2 genome, and because of the conserved nature of the RNAi agent antisense strand sequences disclosed herein, are expected to effectively inhibit numerous coronavirus genomes beyond SARS-CoV-2.

[0012] In general, the present disclosure features CoV RNAi agents that are specific to SARS-CoV-2 and target a portion of the genome that is conserved across other CoV genomes, compositions that include the disclosed CoV RNAi agents, and methods for inhibiting expression of a SARS-CoV-2 viral genome and/or other CoV genomes in vitro and/or in vivo, using the CoV RNAi agents and compositions that include CoV RNAi agents described herein. The CoV RNAi agents described herein are able to selectively and efficiently decrease expression of a SARS-CoV-2 viral genome and potentially other CoV genomes.

[0013] The described CoV RNAi agents can be used in methods for therapeutic treatment (including potentially preventative or prophylactic treatment) of symptoms or diseases related to CoV viral infection, including but not limited to COVID 19 and lung inflammation.

[0014] In one aspect, the disclosure features RNAi agents for inhibiting expression of a SARS-CoV-2 viral genome or another CoV viral genome, wherein the RNAi agent includes a sense strand (also referred to as a passenger strand) and an antisense strand (also referred to as a guide strand). The sense strand and the antisense strand can be partially, substantially, or fully complementary to each other. The length of the RNAi agent sense strands described herein each can be 15 to 49 nucleotides in length. The length of the RNAi agent antisense strands described herein each can be 18 to 49 nucleotides in length. In some embodiments, the sense and antisense strands are independently 18 to 26 nucleotides in length. The sense and antisense strands can be either the same length or different lengths. In some embodiments, the sense and antisense strands are independently 21 to 26 nucleotides in length. In some embodiments, the sense and antisense strands are independently 21 to 24 nucleotides in length. In some embodiments, both the sense strand and the antisense strand are 21 nucleotides in length. In some embodiments, the antisense strands are independently 18, 19, 20, 21, 22, 23, 24, 25, 26, 27, 28, 29, or 30 nucleotides in length. In some embodiments, the sense strands are independently 15, 16, 17, 18, 19, 20, 21, 22, 23, 24, 25, 26, 27, 28, 29, 30, 31, 32, 33, 34, 35, 36, 37, 38, 39, 40, 41, 42, 43, 44, 45, 46, 47, 48, or 49 nucleotides in length. The RNAi agents described herein, upon delivery to a cell expressing SARS-CoV-2 such as a pulmonary cell, inhibit the expression of one or more SARS-CoV-2 viral genome variants in vivo and/or in vitro through the RNA-induced silencing complex (RISC)-mediated cleavage of the viral RNA genome and RNA transcripts.

[0015] The CoV RNAi agents disclosed herein are designed to target a SARS-CoV-2 viral genome (see, e.g., SEQ ID NO:1) in a region of the genome that is anticipated to be conserved across a variety of different coronaviruses. More specifically, the optimized CoV RNAi agents disclosed herein are designed to target a portion of a SARS-CoV-2 viral genome having the sequence of any of the sequences disclosed in Table 1.

[0016] In another aspect, the disclosure features compositions, including pharmaceutical compositions, that include one or more of the disclosed CoV RNAi agents that are able to selectively and efficiently decrease expression of a SARS-CoV-2 viral genome or a different CoV viral genome. The compositions that include one or more CoV RNAi agents described herein can be administered to a subject, such as a human or animal subject, for the treatment (including potential prophylactic treatment or inhibition) of symptoms and diseases associated with coronavirus infection, including but not limited to COVID-19 and lung inflammation.

[0017] Examples of CoV RNAi agent sense strands and antisense strands that can be used in a CoV RNAi agent disclosed and claimed are provided in Tables 3B, 4B, 5B, and 6B. Examples of CoV RNAi agent duplexes are provided in Tables 7A-2, 7B-2, 8B, 9B, and 10B. Examples of 19-nucleotide core stretch sequences that may consist of or may be included in the sense strands and antisense strands of certain CoV RNAi agents disclosed herein, are provided in Table 2.

[0018] In another aspect, the disclosure features methods for delivering CoV RNAi agents to pulmonary epithelial cells in a subject, such as a mammal, in vivo. Also described herein are compositions for use in such methods. In some embodiments, disclosed herein are methods for delivering CoV RNAi agents to pulmonary cells (epithelial cells (including alveolar type I and type II pneumocytes), mesenchymal cells (including smooth muscle cells and fibroblasts), immune cells (including macrophages and mast cells) and endothelial cells) to a subject in vivo. In some embodiments, the subject is a human subject.

[0019] The methods disclosed herein include the administration of one or more CoV RNAi agents to a subject, e.g., a human or animal subject, by any suitable means known in the art. The pharmaceutical compositions disclosed herein that include one or more CoV RNAi agents can be administered in a number of ways depending upon whether local or systemic treatment is desired. Administration can be, but is not limited to, for example, intravenous, intraarterial, subcutaneous, intraperitoneal, subdermal (e.g., via an implanted device), and intraparenchymal administration. In some embodiments, the pharmaceutical compositions described herein are administered by inhalation (such as dry powder inhalation or aerosol inhalation), intranasal administration, intratracheal administration, or oropharyngeal aspiration administration.

[0020] In some embodiments, it is desired that the CoV RNAi agents described herein inhibit the expression of a CoV viral genome in the pulmonary epithelium, for which the administration is by inhalation (e.g., by an inhaler device, such as a metered-dose inhaler, or a nebulizer such as a jet or vibrating mesh nebulizer, or a soft mist inhaler). In some embodiments, the viral genome being inhibited is SARS-CoV-2.

[0021] The CoV RNAi agents described herein can be delivered to target cells or tissues using any oligonucleotide delivery technology known in the art. In some embodiments, a CoV RNAi agent is delivered to cells or tissues by covalently linking the RNAi agent to a targeting group. In some embodiments, the targeting group can include a cell receptor ligand, such as an integrin targeting ligand. Integrins are a family of transmembrane receptors that facilitate cell-extracellular matrix (ECM) adhesion. In particular, integrin alpha-v-beta-6 (αvβ6) is an epithelial-specific integrin that is known to be a receptor for ECM proteins and the TGF-beta latency-associated peptide (LAP), and is expressed in various cells and tissues. Integrin αvβ6 is known to be highly upregulated in injured pulmonary epithelium. In some embodiments, the CoV RNAi agents described herein are linked to an integrin targeting ligand that has affinity for integrin αvβ6. As referred to herein, an “αvβ6 integrin targeting ligand” is a compound that has affinity for integrin αvβ6, which can be utilized as a ligand to facilitate the targeting and delivery of an RNAi agent to which it is attached to the desired cells and/or tissues (i.e., to cells expressing integrin αvβ6). In some embodiments, multiple αvβ6 integrin targeting ligands or clusters of αvβ6 integrin targeting ligands are linked to a CoV RNAi agent. In some embodiments, the CoV RNAi agent-αvβ6 integrin targeting ligand conjugates are selectively internalized by lung epithelial cells, either through receptor-mediated endocytosis or by other means.

[0022] Examples of targeting groups useful for delivering CoV RNAi agents that include αvβ6 integrin targeting ligands are disclosed, for example, in International Patent Application Publication No. WO 2018/085415 and International Patent Application Publication No. WO 2019/089765, the contents of each of which are incorporated by reference herein in their entirety.

[0023] A targeting group can be linked to the 3′ or 5′ end of a sense strand or an antisense strand of a CoV RNAi agent. In some embodiments, a targeting group is linked to the 3′ or 5′ end of the sense strand. In some embodiments, a targeting group is linked to the 5′ end of the sense strand. In some embodiments, a targeting group is linked internally to a nucleotide on the sense strand and/or the antisense strand of the RNAi agent. In some embodiments, a targeting group is linked to the RNAi agent via a linker.

[0024] In another aspect, the disclosure features compositions that include one or more CoV RNAi agents that have the duplex structures disclosed in Tables 7A-2, 7B-2, 8B, 9B, and 10B.

[0025] The use of CoV RNAi agents provides methods for therapeutic (including prophylactic) treatment of diseases or disorders related to coronavirus infection, such as COVID-19 caused by SARS-CoV-2. The CoV RNAi agents disclosed herein can be used to treat various respiratory diseases and injury related to coronavirus infection. In some embodiments, the CoV RNAi agents disclosed herein can be used to treat or prevent a pulmonary inflammatory disease or condition.

### Definitions

[0026] As used herein, the terms “oligonucleotide” and “polynucleotide” mean a polymer of linked nucleosides each of which can be independently modified or unmodified.

[0027] As used herein, an “RNAi agent” (also referred to as an “RNAi trigger”) means a chemical composition of matter that contains an RNA or RNA-like (e.g., chemically modified RNA) oligonucleotide molecule that is capable of degrading RNA or inhibiting (e.g., degrades or inhibits under appropriate conditions) translation of viral RNA (including viral RNA and viral mRNA messenger RNA (mRNA) transcripts) of a target coronavirus in a sequence specific manner. As used herein, RNAi agents may operate through the RNA interference mechanism (i.e., inducing RNA interference through interaction with the RNA interference pathway machinery (RNA-induced silencing complex or RISC) of mammalian cells), or by any alternative mechanism(s) or pathway(s). While it is believed that RNAi agents, as that term is used herein, operate primarily through the RNA interference mechanism, the disclosed RNAi agents are not bound by or limited to any particular pathway or mechanism of action. RNAi agents disclosed herein are comprised of a sense strand and an antisense strand, and include, but are not limited to: small (or short) interfering RNAs (siRNAs), double stranded RNAs (dsRNA), micro RNAs (miRNAs), short hairpin RNAs (shRNA), and dicer substrates. The antisense strand of the RNAi agents described herein is at least partially complementary to the RNA being targeted (e.g., SARS-CoV-2 RNA). RNAi agents can include one or more modified nucleotides and/or one or more non-phosphodiester linkages.

[0028] As used herein, the terms “silence,” “reduce,” “inhibit,” “down-regulate,” or “knockdown” when referring to expression of a given viral genome, mean that the expression of the viral genome (viral genomic RNA or subgenomic RNA), as measured by the level of RNA transcribed from the gene or genome, the number of viral genomes, or the level of polypeptide, protein, or protein subunit translated from the viral RNA in a cell, group of cells, tissue, organ, or subject in which the gene or viral genome is transcribed, is reduced when the cell, group of cells, tissue, organ, or subject is treated with the RNAi agents described herein as compared to a second cell, group of cells, tissue, organ, or subject that has not or have not been so treated. Without being bound to any particular theory, it is believed that the CoV RNAi agents disclosed herein utilize the RNA interference mechanism to inhibit CoV viral transcripts thereby leading to a reduction in viral genome expression.

[0029] As used herein, the terms “sequence” and “nucleotide sequence” mean a succession or order of nucleobases or nucleotides, described with a succession of letters using standard nomenclature.

[0030] As used herein, a “base,” “nucleotide base,” or “nucleobase,” is a heterocyclic pyrimidine or purine compound that is a component of a nucleotide, and includes the primary purine bases adenine and guanine, and the primary pyrimidine bases cytosine, thymine, and uracil. A nucleobase may further be modified to include, without limitation, universal bases, hydrophobic bases, promiscuous bases, size-expanded bases, and fluorinated bases. (See, e.g., Modified Nucleosides in Biochemistry, Biotechnology and Medicine, Herdewijn, P. ed. Wiley-VCH, 2008). The synthesis of such modified nucleobases (including phosphoramidite compounds that include modified nucleobases) is known in the art.

[0031] As used herein, and unless otherwise indicated, the term “complementary,” when used to describe a first nucleobase or nucleotide sequence (e.g., RNAi agent sense strand or targeted RNA) in relation to a second nucleobase or nucleotide sequence (e.g., RNAi agent antisense strand or a single-stranded antisense oligonucleotide), means the ability of an oligonucleotide or polynucleotide including the first nucleotide sequence to hybridize (form base pair hydrogen bonds under mammalian physiological conditions (or otherwise suitable in vivo or in vitro conditions)) and form a duplex or double helical structure under certain standard conditions with an oligonucleotide that includes the second nucleotide sequence. The person of ordinary skill in the art would be able to select the set of conditions most appropriate for a hybridization test. Complementary sequences include Watson-Crick base pairs or non-Watson-Crick base pairs and include natural or modified nucleotides or nucleotide mimics, at least to the extent that the above hybridization requirements are fulfilled. Sequence identity or complementarity is independent of modification. For example, a and Af, as defined herein, are complementary to U (or T) and identical to A for the purposes of determining identity or complementarity.

[0032] As used herein, “perfectly complementary” or “fully complementary” means that in a hybridized pair of nucleobase or nucleotide sequence molecules, all (100%) of the bases in a contiguous sequence of a first oligonucleotide will hybridize with the same number of bases in a contiguous sequence of a second oligonucleotide. The contiguous sequence may comprise all or a part of a first or second nucleotide sequence.

[0033] As used herein, “partially complementary” means that in a hybridized pair of nucleobase or nucleotide sequence molecules, at least 70%, but not all, of the bases in a contiguous sequence of a first oligonucleotide will hybridize with the same number of bases in a contiguous sequence of a second oligonucleotide. The contiguous sequence may comprise all or a part of a first or second nucleotide sequence.

[0034] As used herein, “substantially complementary” means that in a hybridized pair of nucleobase or nucleotide sequence molecules, at least 85%, but not all, of the bases in a contiguous sequence of a first oligonucleotide will hybridize with the same number of bases in a contiguous sequence of a second oligonucleotide. The contiguous sequence may comprise all or a part of a first or second nucleotide sequence.

[0035] As used herein, the terms “complementary,” “fully complementary,” “partially complementary,” and “substantially complementary” are used with respect to the nucleobase or nucleotide matching between the sense strand and the antisense strand of an RNAi agent, or between the antisense strand of an RNAi agent and a sequence of a CoV RNA, such as a SARS-CoV-2 RNA.

[0036] As used herein, the term “substantially identical” or “substantial identity,” as applied to a nucleic acid sequence means the nucleotide sequence (or a portion of a nucleotide sequence) has at least about 85% sequence identity or more, e.g., at least 90%, at least 95%, or at least 99% identity, compared to a reference sequence. Percentage of sequence identity is determined by comparing two optimally aligned sequences over a comparison window. The percentage is calculated by determining the number of positions at which the same type of nucleic acid base occurs in both sequences to yield the number of matched positions, dividing the number of matched positions by the total number of positions in the window of comparison and multiplying the result by 100 to yield the percentage of sequence identity. The inventions disclosed herein encompass nucleotide sequences substantially identical to those disclosed herein.

[0037] As used herein, the terms “treat,” “treatment,” and the like, mean the methods or steps taken to provide relief from or alleviation of the number, severity, and/or frequency of one or more symptoms of a disease in a subject. As used herein, “treat” and “treatment” may include the prevention, management, prophylactic treatment, and/or inhibition or reduction of the number, severity, and/or frequency of one or more symptoms of a disease in a subject.

[0038] As used herein, the phrases “symptoms and diseases associated with coronavirus infection” and a “coronavirus associate disease” refer to a symptom, disease, or disorder that is caused by or associated with a coronavirus infection. A “coronavirus infection” includes an infection with any coronavirus such as, for example, the two alpha-CoVs (HCoVs-NL63 and HCoVs-229E), the two beta-CoVs (HCoVs-OC43 and HCoVs-HKU1), severe acute respiratory syndrome-CoV (SARS-CoV), and Middle East respiratory syndrome-CoV (MERS-CoV). The symptoms of a coronavirus infection depend on the seriousness of the infection and the type of coronavirus.

[0039] As used herein, the phrase “introducing into a cell,” when referring to an RNAi agent, means functionally delivering the RNAi agent into a cell. The phrase “functional delivery,” means delivering the RNAi agent to the cell in a manner that enables the RNAi agent to have the expected biological activity, e.g., sequence-specific inhibition of gene or viral genome expression.

[0040] Unless stated otherwise, use of the symbol [symbol] as used herein means that any group or groups may be linked thereto that is in accordance with the scope of the inventions described herein.

[0041] As used herein, the term “isomers” refers to compounds that have identical molecular formulae, but that differ in the nature or the sequence of bonding of their atoms or in the arrangement of their atoms in space. Isomers that differ in the arrangement of their atoms in space are termed “stereoisomers.” Stereoisomers that are not mirror images of one another are termed “diastereoisomers,” and stereoisomers that are non-superimposable mirror images are termed “enantiomers,” or sometimes optical isomers. A carbon atom bonded to four non-identical substituents is termed a “chiral center.”

[0042] As used herein, unless specifically identified in a structure as having a particular conformation, for each structure in which asymmetric centers are present and thus give rise to enantiomers, diastereomers, or other stereoisomeric configurations, each structure disclosed herein is intended to represent all such possible isomers, including their optically pure and racemic forms. For example, the structures disclosed herein are intended to cover mixtures of diastereomers as well as single stereoisomers.

[0043] As used in a claim herein, the phrase “consisting of” excludes any element, step, or ingredient not specified in the claim. When used in a claim herein, the phrase “consisting essentially of” limits the scope of a claim to the specified materials or steps and those that do not materially affect the basic and novel characteristic(s) of the claimed invention.

[0044] The person of ordinary skill in the art would readily understand and appreciate that the compounds and compositions disclosed herein may have certain atoms (e.g., N, O, or S atoms) in a protonated or deprotonated state, depending upon the environment in which the compound or composition is placed. Accordingly, as used herein, the structures disclosed herein envisage that certain functional groups, such as, for example, OH, SH, or NH, may be protonated or deprotonated. The disclosure herein is intended to cover the disclosed compounds and compositions regardless of their state of protonation based on the environment (such as pH), as would be readily understood by the person of ordinary skill in the art. Correspondingly, compounds described herein with labile protons or basic atoms should also be understood to represent salt forms of the corresponding compound. The RNAi agents described herein may be in a free acid, free base, or salt form. Pharmaceutically acceptable salts of the RNAi agent compounds described herein should be understood to be within the scope of the invention.

[0045] As used herein, the term “linked” or “conjugated” when referring to the connection between two compounds or molecules means that two compounds or molecules are joined by a covalent bond. Unless stated, the terms “linked” and “conjugated” as used herein may refer to the connection between a first compound and a second compound either with or without any intervening atoms or groups of atoms.

[0046] As used herein, the term “including” is used to herein mean, and is used interchangeably with, the phrase “including but not limited to.” The term “or” is used herein to mean, and is used interchangeably with, the term “and/or,” unless the context clearly indicates otherwise.

[0047] Unless otherwise defined, all technical and scientific terms used herein have the same meaning as commonly understood by one of ordinary skill in the art. Although methods and materials similar or equivalent to those described herein can be used in the practice or testing of the present invention, suitable methods and materials are described below. All publications, patent applications, patents, and other references mentioned herein are incorporated by reference in their entirety. In case of conflict, the present specification, including definitions, will control. In addition, the materials, methods, and examples are illustrative only and not intended to be limiting.

[0048] Other objects, features, aspects, and advantages of the invention will be apparent from the following detailed description, accompanying figures, and from the claims.

### BRIEF DESCRIPTION OF THE DRAWINGS

[0049] FIG. 1. Chemical structure representation of the tridentate αvβ6 epithelial cell targeting ligand referred to herein as Tri-SM6.1-αvβ6-(TA14).

[0050] FIG. 2. Graph plotting the reduction of CoV genomic viral RNA in lung tissue on Day 3 post infection (see also Example 10).

[0051] FIG. 3. Graph plotting the reduction of CoV subgenomic RNA in lung tissue on Day 3 post infection. (see also Example 10).

[0052] FIG. 4. Bar graph showing reduction of total inflammation of the superior lobe of the lung on Day 7 post infection (see also Example 10).

[0053] FIG. 5. Bar graph showing reduction of alveolar inflammation on Day 7 post infection (see also Example 10).

[0054] FIG. 6. Bar graph showing plaque-forming units (PFU) reduction on Day 3 post infection (see also Example 10).

[0055] FIG. 7. Line graph showing body weight restoration (see also Example 10).

[0056] FIG. 8. Pre-SARS-CoV-2 infection, % hamster body weight change (see also Example 13).

[0057] FIG. 9. Post-SARS-CoV-2 infection, % hamster body weight change (see also Example 13).

[0058] FIG. 10. Viral titers in lung tissue at days 3 and 7 post infection expressed in PFU/ml homogenized tissue. Dotted line indicates the limit of detection (LOD) of the assay of 10 PFU/ml (see also Example 13).

[0059] FIG. 11. Viral titers in lungs at days 3 and 7 post infection expressed as PFU/gram of lung tissue, normalized to the weight of the tissue. Dotted line indicates the limit of detection (LOD) of the assay of 10 PFU/gram (see also Example 13).

[0060] FIG. 12. Viral genomic RNA copies in lung homogenates at days 3 and 7 post infection, normalized to 100 mg of lung tissue (see also Example 13).

[0061] FIG. 13. Viral subgenomic RNA copies in the lung homogenates at days 3 and 7 post infection, normalized to 100 mg of lung tissue (see also Example 13).

[0062] FIG. 14. Pre-SARS-CoV-2 infection, % body weight change: Body weight at day −7 was used to calculate % body weight gain/loss in the pre-infection phase (see also Example 14).

[0063] FIG. 15. Post-SARS-CoV-2 infection, % body weight change: Body weight at day 0 was used to calculate % body weight gain/loss in post infection phase (see also Example 14).

[0064] FIG. 16A. Viral genomic RNA copies in the lung, 3 days post infection (see also Example 14).

[0065] FIG. 16B. Viral subgenomic RNA copies in the lung, 3 days post infection (see also Example 14).

[0066] FIG. 17A. Viral genomic RNA copies in the lung, 7 days post infection (see also Example 14).

[0067] FIG. 17B. Viral subgenomic RNA copies in the lung, 7 days post infection (see also Example 14).

[0068] FIG. 18A. Viral titers in lungs at day 3 post infection expressed in PFU/ml (see also Example 14).

[0069] FIG. 18B. Viral titers in lungs at day 3 post infection expressed in PFU/gram of lung tissue (see also Example 14).

[0070] FIG. 19A. Pre-SARS-CoV-2 infection, % body weight change: Body weight at day −7 was used to calculate % body weight gain/loss in the pre-infection phase (see also Example 14).

[0071] FIG. 19B. Post-SARS-CoV-2 infection, % body weight change: Body weight at day 0 was used to calculate % body weight gain/loss in post infection phase (see also Example 14).

[0072] FIG. 20A. Viral genomic RNA copies in the lung, 3 days post infection (see also Example 14).

[0073] FIG. 20B. Viral subgenomic RNA copies in the lung, 3 days post infection (see also Example 14).

[0074] FIG. 21A. Viral genomic RNA copies in the lung, 7 days post infection (see also Example 14).

[0075] FIG. 21B. Viral subgenomic RNA copies in the lung, 7 days post infection (see also Example 14).

[0076] FIG. 21C. Viral titers determined by plaque assay in PFU/ml, 3 days post infection (see also Example 14).

[0077] FIG. 21D. Viral titers normalized to the weight of the tissue and expressed as PFU/gram of lung tissue, 3 days post infection (see also Example 14).

[0078] FIG. 22A. Bar graph showing reduction of total inflammation of the superior lobe section of the lung on Day 7 post infection (see also Example 14).

[0079] FIG. 22B. Bar graph showing reduction of inflammation of the alveolar lung area of the superior lobe section of the lung on Day 7 post infection (see also Example 14).

[0080] FIG. 23A. H&E-stained superior lobe of the right lung of uninfected control group hamsters that were naïve or received saline vehicle, lungs collected 3 days post infection (see also Example 14).

[0081] FIG. 23B. H&E-stained superior lobe of the right lung of hamsters that received AC001927 or saline control, lungs collected 3 days post infection (see also Example 14).

[0082] FIG. 23C. H&E-stained superior lobe of the right lung of hamsters that received AC002617 or saline control, lungs collected 3 days post infection (see also Example 14).

[0083] FIG. 23D. H&E-stained superior lobe of the right lung of hamsters that received AC002618 or saline control, lungs collected 3 days post infection (see also Example 14).

[0084] FIG. 23E. H&E-stained superior lobe of the right lung of hamsters that received AC002620 or saline control, lungs collected 3 days post infection (see also Example 14).

[0085] FIG. 23F. H&E-stained superior lobe of the right lung of hamsters that received AC002621 or saline control, lungs collected 3 days post infection (see also Example 14).

[0086] FIG. 24A. H&E-stained superior lobe of the right lung of hamsters that received AC001927 or saline control, lungs collected 7 days post infection (see also Example 14).

[0087] FIG. 24B. H&E-stained superior lobe of the right lung of hamsters that received AC002617 or saline control, lungs collected 7 days post infection (see also Example 14).

[0088] FIG. 24C. H&E-stained superior lobe of the right lung of hamsters that received AC002618 or saline control, lungs collected 7 days post infection (see also Example 14).

[0089] FIG. 24D. H&E-stained superior lobe of the right lung of hamsters that received AC002620 or saline control, lungs collected 7 days post infection (see also Example 14).

[0090] FIG. 24E. H&E-stained superior lobe of the right lung of hamsters that received AC002621 or saline control, lungs collected 7 days post infection (see also Example 14).

[0091] FIG. 25A. Group average hamster body weights (g) pre- and post-SARS-CoV-2 infection (see also Example 15).

[0092] FIG. 25B. Total pulmonary inflammation area of the experimental groups treated with the CoV RNAi agents (see also Example 15).

[0093] FIG. 25C. Viral genomic RNA copies in the lung, 3 days post infection (see also Example 15).

[0094] FIG. 25D. Viral subgenomic RNA copies in the lung, 3 days post infection (see also Example 15).

[0095] FIG. 25E. Viral genomic RNA copies in the lung, 7 days post infection (see also Example 15).

[0096] FIG. 25F. Viral subgenomic RNA copies in the lung, 7 days post infection (see also Example 15).

### DETAILED DESCRIPTION

### RNAi Agents

[0097] Described herein are optimized RNAi agents for inhibiting expression of a CoV viral genome, including but not limited to SARS-CoV-2 (referred to herein as CoV RNAi agents or CoV RNAi triggers). Each CoV RNAi agent disclosed herein comprises a sense strand and an antisense strand. The sense strand can be 15 to 49 nucleotides in length, and the antisense strand can be 18 to 49 nucleotides in length. The sense and antisense strands can be either the same length or they can be different lengths. In some embodiments, the sense and antisense strands are each independently 18 to 27 nucleotides in length. In some embodiments, both the sense and antisense strands are each 19-26 nucleotides in length. In some embodiments, the sense and antisense strands are each 21-24 nucleotides in length. In some embodiments, the sense and antisense strands are each independently 19-21 nucleotides in length. In some embodiments, the sense strand is about 19 nucleotides in length while the antisense strand is about 21 nucleotides in length. In some embodiments, the sense strand is about 21 nucleotides in length while the antisense strand is about 23 nucleotides in length. In some embodiments, a sense strand is 23 nucleotides in length and an antisense strand is 21 nucleotides in length. In some embodiments, both the sense and antisense strands are each 21 nucleotides in length. In some embodiments, the RNAi agent sense strands are 15, 16, 17, 18, 19, 20, 21, 22, 23, 24, 25, 26, 27, 28, 29, 30, 31, 32, 33, 34, 35, 36, 37, 38, or 39 nucleotides in length. In some embodiments, the RNAi agent antisense strands are 18, 19, 20, 21, 22, 23, 24, 25, 26, 27, 28, 29, 30, 31, 32, 33, 34, 35, 36, 37, 38, or 39 nucleotides in length. In some embodiments, a double-stranded RNAi agent has a duplex length of about 16, 17, 18, 19, 20, 21, 22, 23 or 24 nucleotides.

[0098] Examples of nucleotide sequences used in forming CoV RNAi agents are provided in Tables 2, 3B, 4B, 5B, 6B, and 10B. Examples of RNAi agent duplexes, that include the sense strand and antisense strand sequences in Tables 2, 3B, 4B, 5B, 6B, are shown in Tables 7A-2, 7B-2, 8B, 9B, and 10B.

[0099] In some embodiments, the region of perfect, substantial, or partial complementarity between the sense strand and the antisense strand is 15-26 (e.g., 15, 16, 17, 18, 19, 20, 21, 22, 23, 24, 25, or 26) nucleotides in length and occurs at or near the 5′ end of the antisense strand (e.g., this region may be separated from the 5′ end of the antisense strand by 0, 1, 2, 3, or 4 nucleotides that are not perfectly, substantially, or partially complementary).

[0100] A sense strand of the CoV RNAi agents described herein includes at least 15 consecutive nucleotides that have at least 85% identity to a core stretch sequence (also referred to herein as a “core stretch” or “core sequence”) of the same number of nucleotides in a SARS-CoV-2 RNA (including all viral RNA as well as viral mRNA). In some embodiments, a sense strand core stretch sequence is 100% (perfectly) complementary or at least about 85% (substantially) complementary to a core stretch sequence in the antisense strand, and thus the sense strand core stretch sequence is typically perfectly identical or at least about 85% identical to a nucleotide sequence of the same length (sometimes referred to, e.g., as a target sequence) present in the SARS-CoV-2 RNA target, which as noted elsewhere is a target sequence that is known to be conserved across a variety of coronaviruses. In some embodiments, this sense strand core stretch is 15, 16, 17, 18, 19, 20, 21, 22, or 23 nucleotides in length. In some embodiments, this sense strand core stretch is 17 nucleotides in length. In some embodiments, this sense strand core stretch is 19 nucleotides in length.

[0101] An antisense strand of a CoV RNAi agent described herein includes at least 17 consecutive nucleotides that have at least 85% complementarity to a core stretch of the same number of nucleotides in a SARS-CoV-2 RNA or another CoV RNA being targeted, and at least 15 consecutive nucleotides that have at least 85% complementarity to a core stretch of the same number of nucleotides to a core stretch of the same number of nucleotides in the corresponding sense strand. In some embodiments, an antisense strand core stretch is 100% (perfectly) complementary or at least about 85% (substantially) complementary to a nucleotide sequence (e.g., target sequence) of the same length present in a SARS-CoV-2 RNA target. In some embodiments, this antisense strand core stretch is 15, 16, 17, 18, 19, 20, 21, 22, or 23 nucleotides in length. In some embodiments, this antisense strand core stretch is 19 nucleotides in length. In some embodiments, this antisense strand core stretch is 17 nucleotides in length. A sense strand core stretch sequence can be the same length as a corresponding antisense core sequence or it can be a different length.

[0102] The CoV RNAi agent sense and antisense strands anneal to form a duplex. A sense strand and an antisense strand of a CoV RNAi agent can be partially, substantially, or fully complementary to each other. Within the complementary duplex region, the sense strand core stretch sequence is at least 85% complementary or 100% complementary to the antisense core stretch sequence. In some embodiments, the sense strand core stretch sequence contains a sequence of at least 15, at least 16, at least 17, at least 18, at least 19, at least 20, at least 21, at least 22, or at least 23 nucleotides that is at least 85% or 100% complementary to a corresponding 15, 16, 17, 18, 19, 20, 21, 22, or 23 nucleotide sequence of the antisense strand core stretch sequence (i.e., the sense and antisense core stretch sequences of a CoV RNAi agent have a region of at least 15, at least 16, at least 17, at least 18, at least 19, at least 20, at least 21, at least 22, or at least 23 nucleotides that is at least 85% base paired or 100% base paired.)

[0103] In some embodiments, the antisense strand of a CoV RNAi agent disclosed herein differs by 0, 1, 2, or 3 nucleotides from any of the antisense strand sequences in Table 2 or Table 3B. In some embodiments, the sense strand of a CoV RNAi agent disclosed herein differs by 0, 1, 2, or 3 nucleotides from any of the sense strand sequences in Table 2, Table 4B, Table 5B, Table 6B, or Table 10B.

[0104] In some embodiments, the sense strand and/or the antisense strand can optionally and independently contain an additional 1, 2, 3, 4, 5, or 6 nucleotides (extension) at the 3′ end, the 5′ end, or both the 3′ and 5′ ends of the core stretch sequences. The antisense strand additional nucleotides, if present, may or may not be complementary to the corresponding sequence in a SARS-CoV-2 RNA. The sense strand additional nucleotides, if present, may or may not be identical to the corresponding sequence in a SARS-CoV-2 RNA. The antisense strand additional nucleotides, if present, may or may not be complementary to the corresponding sense strand's additional nucleotides, if present.

[0105] As used herein, an extension comprises 1, 2, 3, 4, 5, or 6 nucleotides at the 5′ and/or 3′ end of the sense strand core stretch sequence and/or antisense strand core stretch sequence. The extension nucleotides on a sense strand may or may not be complementary to nucleotides, either core stretch sequence nucleotides or extension nucleotides, in the corresponding antisense strand. Conversely, the extension nucleotides on an antisense strand may or may not be complementary to nucleotides, either core stretch nucleotides or extension nucleotides, in the corresponding sense strand. In some embodiments, both the sense strand and the antisense strand of an RNAi agent contain 3′ and 5′ extensions. In some embodiments, one or more of the 3′ extension nucleotides of one strand base pairs with one or more 5′ extension nucleotides of the other strand. In other embodiments, one or more of 3′ extension nucleotides of one strand do not base pair with one or more 5′ extension nucleotides of the other strand. In some embodiments, a CoV RNAi agent has an antisense strand having a 3′ extension and a sense strand having a 5′ extension. In some embodiments, the extension nucleotide(s) are unpaired and form an overhang. As used herein, an “overhang” refers to a stretch of one or more unpaired nucleotides located at a terminal end of either the sense strand or the antisense strand that does not form part of the hybridized or duplexed portion of an RNAi agent disclosed herein.

[0106] In some embodiments, a CoV RNAi agent comprises an antisense strand having a 3′ extension of 1, 2, 3, 4, 5, or 6 nucleotides in length. In other embodiments, a CoV RNAi agent comprises an antisense strand having a 3′ extension of 1, 2, or 3 nucleotides in length. In some embodiments, one or more of the antisense strand extension nucleotides comprise nucleotides that are complementary to the corresponding SARS-CoV-2 RNA sequence. In some embodiments, one or more of the antisense strand extension nucleotides comprise nucleotides that are not complementary to the corresponding SARS-CoV-2 RNA sequence.

[0107] In some embodiments, a CoV RNAi agent comprises a sense strand having a 3′ extension of 1, 2, 3, 4, or 5 nucleotides in length. In some embodiments, one or more of the sense strand extension nucleotides comprises adenosine, uracil, or thymidine nucleotides, AT dinucleotide, or nucleotides that correspond to or are the identical to nucleotides in a SARS-CoV-2 RNA sequence. In some embodiments, the 3′ sense strand extension includes or consists of one of the following sequences, but is not limited to: T, UT, TT, UU, UUT, TTT, or TTTT (each listed 5′ to 3′).

[0108] A sense strand can have a 3′ extension and/or a 5′ extension. In some embodiments, a CoV RNAi agent comprises a sense strand having a 5′ extension of 1, 2, 3, 4, 5, or 6 nucleotides in length. In some embodiments, one or more of the sense strand extension nucleotides comprise nucleotides that correspond to or are identical to nucleotides in a SARS-CoV-2 RNA sequence.

[0109] Examples of sequences used in forming CoV RNAi agents are provided in Tables 2, 3B, 4B, 5B, 6B, and 10B. In some embodiments, a CoV RNAi agent antisense strand includes a modified sequence of any of the sequences in Table 3B or 10B. In certain embodiments, a CoV RNAi agent antisense strand comprises or consists of any one of the modified sequences in Table 3B. In some embodiments, a CoV RNAi agent antisense strand includes the sequence of nucleotides (from 5′ end→3′ end) 1-17, 2-15, 2-17, 1-18, 2-18, 1-19, 2-19, 1-20, 2-20, 1-21, or 2-21, of any of the modified sequences in Table 3B. In some embodiments, a CoV RNAi agent sense strand includes the sequence of any of the modified sequences in Tables 4B, 5B, or 6B. In some embodiments, a CoV RNAi agent sense strand includes the sequence of nucleotides (from 5′ end→3′ end) 1-18, 1-19, 1-20, 1-21, 2-19, 2-20, 2-21, 3-20, 3-21, or 4-21 of any of the modified sequences in Tables 4B, 5B, or 6B. In certain embodiments, a CoV RNAi agent sense strand comprises or consists of a modified sequence of any one of the modified sequences in Table 4B, 5B, 6B, or 10B.

[0110] In some embodiments, the sense and antisense strands of the RNAi agents described herein contain the same number of nucleotides. In some embodiments, the sense and antisense strands of the RNAi agents described herein contain different numbers of nucleotides. In some embodiments, the sense strand 5′ end and the antisense strand 3′ end of an RNAi agent form a blunt end. In some embodiments, the sense strand 3′ end and the antisense strand 5′ end of an RNAi agent form a blunt end. In some embodiments, both ends of an RNAi agent form blunt ends. In some embodiments, neither end of an RNAi agent is blunt-ended. As used herein a “blunt end” refers to an end of a double stranded RNAi agent in which the terminal nucleotides of the two annealed strands are complementary (form a complementary base-pair).

[0111] In some embodiments, the sense strand 5′ end and the antisense strand 3′ end of an RNAi agent form a frayed end. In some embodiments, the sense strand 3′ end and the antisense strand 5′ end of an RNAi agent form a frayed end. In some embodiments, both ends of an RNAi agent form a frayed end. In some embodiments, neither end of an RNAi agent is a frayed end. As used herein a frayed end refers to an end of a double stranded RNAi agent in which the terminal nucleotides of the two annealed strands form a pair (i.e., do not form an overhang) but are not complementary (i.e. form a non-complementary pair). In some embodiments, one or more unpaired nucleotides at the end of one strand of a double stranded RNAi agent form an overhang. The unpaired nucleotides may be on the sense strand or the antisense strand, creating either 3′ or 5′ overhangs. In some embodiments, the RNAi agent contains: a blunt end and a frayed end, a blunt end and 5′ overhang end, a blunt end and a 3′ overhang end, a frayed end and a 5′ overhang end, a frayed end and a 3′ overhang end, two 5′ overhang ends, two 3′ overhang ends, a 5′ overhang end and a 3′ overhang end, two frayed ends, or two blunt ends. Typically, when present, overhangs are located at the 3′ terminal ends of the sense strand, the antisense strand, or both the sense strand and the antisense strand.

[0112] The CoV RNAi agents disclosed and claimed herein are comprised of modified nucleotides. In some embodiments, substantially all of the nucleotides of the sense strand and substantially all of the nucleotides of the antisense strand of the CoV RNAi agent are modified nucleotides. The CoV RNAi agents disclosed herein may further be comprised of one or more modified internucleoside linkages, e.g., one or more phosphorothioate or phosphorodithioate linkages. In some embodiments, a CoV RNAi agent contains one or more modified nucleotides and one or more modified internucleoside linkages. In some embodiments, a 2′-modified nucleotide is combined with modified internucleoside linkage.

[0113] In some embodiments, a CoV RNAi agent is prepared or provided as a salt, mixed salt, or a free-acid. In some embodiments, a CoV RNAi agent is prepared as a pharmaceutically acceptable salt. In some embodiments, a CoV RNAi agent is prepared as a pharmaceutically acceptable sodium salt. Such forms that are well known in the art are within the scope of the inventions disclosed herein.

### Modified Nucleotides

[0114] Modified nucleotides, when used in various oligonucleotide constructs, can preserve activity of the compound in cells while at the same time increasing the serum stability of these compounds, and can also minimize the possibility of activating interferon activity in humans upon administration of the oligonucleotide construct.

[0115] The CoV RNAi agents disclosed and claimed herein contain modified nucleotides. As used herein, a “modified nucleotide” is a nucleotide other than a ribonucleotide (2′-hydroxyl nucleotide). In some embodiments, at least 50% (e.g., at least 60%, at least 70%, at least 80%, at least 90%, at least 95%, at least 97%, at least 98%, at least 99%, or 100%) of the nucleotides are modified nucleotides. As used herein, modified nucleotides can include, but are not limited to, deoxyribonucleotides, nucleotide mimics, abasic nucleotides, 2′-modified nucleotides, inverted nucleotides, modified nucleobase-comprising nucleotides, bridged nucleotides, peptide nucleic acids (PNAs), 2′,3′-seco nucleotide mimics (unlocked nucleobase analogues), locked nucleotides, 3′-O-methoxy (2′ internucleoside linked) nucleotides, 2′-F-Arabino nucleotides, 5′-Me, 2′-fluoro nucleotide, morpholino nucleotides, vinyl phosphonate deoxyribonucleotides, vinyl phosphonate containing nucleotides, and cyclopropyl phosphonate containing nucleotides. 2′-modified nucleotides (i.e., a nucleotide with a group other than a hydroxyl group at the 2′ position of the five-membered sugar ring) include, but are not limited to, 2′-O-methyl nucleotides (also referred to as 2′-methoxy nucleotides), 2′-fluoro nucleotides (also referred to herein as 2′-deoxy-2′-fluoro nucleotides), 2′-deoxy nucleotides, 2′-methoxyethyl (2′-O-2-methoxylethyl) nucleotides (also referred to as 2′-MOE), 2′-amino nucleotides, and 2′-alkyl nucleotides. It is not necessary for all positions in a given compound to be uniformly modified. Conversely, more than one modification can be incorporated in a single CoV RNAi agent or even in a single nucleotide thereof. The CoV RNAi agent sense strands and antisense strands can be synthesized and/or modified by methods known in the art. Modification at one nucleotide is independent of modification at another nucleotide.

[0116] Modified nucleobases include synthetic and natural nucleobases, such as 5-substituted pyrimidines, 6-azapyrimidines and N-2, N-6 and 0-6 substituted purines, (e.g., 2-arninopropyladenine, 5-propynyluracil, or 5-propynylcytosine), 5-methylcytosine (5-me-C), 5-hydroxymethyl cytosine, inosine, xanthine, hypoxanthine, 2-aminoadenine, 6-alkyl (e.g., 6-methyl, 6-ethyl, 6-isopropyl, or 6-n-butyl) derivatives of adenine and guanine, 2-alkyl (e.g., 2-methyl, 2-ethyl, 2-isopropyl, or 2-n-butyl) and other alkyl derivatives of adenine and guanine, 2-thiouracil, 2-thiothymine, 2-thiocytosine, 5-halouracil, cytosine, 5-propynyl uracil, 5-propynyl cytosine, 6-azo uracil, 6-azo cytosine, 6-azo thymine, 5-uracil (pseudouracil), 4-thiouracil, 8-halo, 8-amino, 8-sulfhydryl, 8-thioalkyl, 8-hydroxyl and other 8-substituted adenines and guanines, 5-halo (e.g., 5-bromo), 5-trifluoromethyl, and other 5-substituted uracils and cytosines, 7-methylguanine and 7-methyladenine, 8-azaguanine and 8-azaadenine, 7-deazaguanine, 7-deazaadenine, 3-deazaguanine, and 3-deazaadenine.

[0117] In some embodiments, the 5′ and/or 3′ end of the antisense strand can include abasic residues (Ab), which can also be referred to as an “abasic site” or “abasic nucleotide.” An abasic residue (Ab) is a nucleotide or nucleoside that lacks a nucleobase at the 1′ position of the sugar moiety. (See, e.g., U.S. Pat. No. 5,998,203). In some embodiments, an abasic residue can be placed internally in a nucleotide sequence. In some embodiments, Ab or AbAb can be added to the 3′ end of the antisense strand. In some embodiments, the 5′ end of the sense strand can include one or more additional abasic residues (e.g., (Ab) or (AbAb)). In some embodiments, UUAb, UAb, or Ab are added to the 3′ end of the sense strand. In some embodiments, an abasic (deoxyribose) residue can be replaced with a ribitol (abasic ribose) residue.

[0118] In some embodiments, all or substantially all of the nucleotides of an RNAi agent are modified nucleotides. As used herein, an RNAi agent wherein substantially all of the nucleotides present are modified nucleotides is an RNAi agent having four or fewer (i.e., 0, 1, 2, 3, or 4) nucleotides in both the sense strand and the antisense strand being ribonucleotides (i.e., unmodified). As used herein, a sense strand wherein substantially all of the nucleotides present are modified nucleotides is a sense strand having two or fewer (i.e., 0, 1, or 2) nucleotides in the sense strand being unmodified ribonucleotides. As used herein, an antisense strand wherein substantially all of the nucleotides present are modified nucleotides is an antisense strand having two or fewer (i.e., 0, 1, or 2) nucleotides in the antisense strand being unmodified ribonucleotides. In some embodiments, one or more nucleotides of an RNAi agent is an unmodified ribonucleotide. Chemical structures for certain modified nucleotides are set forth in Table 11 herein.

### Modified Internucleoside Linkages

[0119] In some embodiments, one or more nucleotides of a CoV RNAi agent are linked by non-standard linkages or backbones (i.e., modified internucleoside linkages or modified backbones). Modified internucleoside linkages or backbones include, but are not limited to, phosphorothioate groups (represented herein as a lower case “s”), chiral phosphorothioates, thiophosphates, phosphorodithioates, phosphotriesters, aminoalkyl-phosphotriesters, alkyl phosphonates (e.g., methyl phosphonates or 3′-alkylene phosphonates), chiral phosphonates, phosphinates, phosphoramidates (e.g., 3′-amino phosphoramidate, aminoalkylphosphoramidates, or thionophosphoramidates), thionoalkyl-phosphonates, thionoalkylphosphotriesters, morpholino linkages, boranophosphates having normal 3′-5′ linkages, 2′-5′ linked analogs of boranophosphates, or boranophosphates having inverted polarity wherein the adjacent pairs of nucleoside units are linked 3′-5′ to 5′-3′ or 2′-5′ to 5′-2′. In some embodiments, a modified internucleoside linkage or backbone lacks a phosphorus atom. Modified internucleoside linkages lacking a phosphorus atom include, but are not limited to, short chain alkyl or cycloalkyl inter-sugar linkages, mixed heteroatom and alkyl or cycloalkyl inter-sugar linkages, or one or more short chain heteroatomic or heterocyclic inter-sugar linkages. In some embodiments, modified internucleoside backbones include, but are not limited to, siloxane backbones, sulfide backbones, sulfoxide backbones, sulfone backbones, formacetyl and thioformacetyl backbones, methylene formacetyl and thioformacetyl backbones, alkene-containing backbones, sulfamate backbones, methyleneimino and methylenehydrazino backbones, sulfonate and sulfonamide backbones, amide backbones, and other backbones having mixed N, O, S, and CH₂ components.

[0120] In some embodiments, a sense strand of a CoV RNAi agent can contain 1, 2, 3, 4, 5, or 6 phosphorothioate linkages, an antisense strand of a CoV RNAi agent can contain 1, 2, 3, 4, 5, or 6 phosphorothioate linkages, or both the sense strand and the antisense strand independently can contain 1, 2, 3, 4, 5, or 6 phosphorothioate linkages. In some embodiments, a sense strand of a CoV RNAi agent can contain 1, 2, 3, or 4 phosphorothioate linkages, an antisense strand of a CoV RNAi agent can contain 1, 2, 3, or 4 phosphorothioate linkages, or both the sense strand and the antisense strand independently can contain 1, 2, 3, or 4 phosphorothioate linkages.

[0121] In some embodiments, a CoV RNAi agent sense strand contains at least two phosphorothioate internucleoside linkages. In some embodiments, the phosphorothioate internucleoside linkages are between the nucleotides at positions 1-3 from the 3′ end of the sense strand. In some embodiments, one phosphorothioate internucleoside linkage is at the 5′ end of the sense strand nucleotide sequence, and another phosphorothioate linkage is at the 3′ end of the sense strand nucleotide sequence. In some embodiments, two phosphorothioate internucleoside linkage are located at the 5′ end of the sense strand, and another phosphorothioate linkage is at the 3′ end of the sense strand. In some embodiments, the sense strand does not include any phosphorothioate internucleoside linkages between the nucleotides, but contains one, two, or three phosphorothioate linkages between the terminal nucleotides on both the 5′ and 3′ ends and the optionally present inverted abasic residue terminal caps. In some embodiments, the targeting ligand is linked to the sense strand via a phosphorothioate linkage.

[0122] In some embodiments, a CoV RNAi agent antisense strand contains four phosphorothioate internucleoside linkages. In some embodiments, the four phosphorothioate internucleoside linkages are between the nucleotides at positions 1-3 from the 5′ end of the antisense strand and between the nucleotides at positions 19-21, 20-22, 21-23, 22-24, 23-25, or 24-26 from the 5′ end. In some embodiments, three phosphorothioate internucleoside linkages are located between positions 1-4 from the 5′ end of the antisense strand, and a fourth phosphorothioate internucleoside linkage is located between positions 20-21 from the 5′ end of the antisense strand. In some embodiments, a CoV RNAi agent contains at least three or four phosphorothioate internucleoside linkages in the antisense strand.

### Capping Residues or Moieties

[0123] In some embodiments, the sense strand may include one or more capping residues or moieties, sometimes referred to in the art as a “cap,” a “terminal cap,” or a “capping residue.” As used herein, a “capping residue” is a non-nucleotide compound or other moiety that can be incorporated at one or more termini of a nucleotide sequence of an RNAi agent disclosed herein. A capping residue can provide the RNAi agent, in some instances, with certain beneficial properties, such as, for example, protection against exonuclease degradation. In some embodiments, inverted abasic residues (invAb) (also referred to in the art as “inverted abasic sites”) are added as capping residues (see Table 11). (See, e.g., F. Czauderna, Nucleic Acids Res., 2003, 31(11), 2705-16). Capping residues are generally known in the art, and include, for example, inverted abasic residues as well as carbon chains such as a terminal C₃H₇ (propyl), C₆H₁₃ (hexyl), or C₁₂H₂₅ (dodecyl) groups. In some embodiments, a capping residue is present at either the 5′ terminal end, the 3′ terminal end, or both the 5′ and 3′ terminal ends of the sense strand. In some embodiments, the 5′ end and/or the 3′ end of the sense strand may include more than one inverted abasic deoxyribose moiety as a capping residue.

[0124] In some embodiments, one or more inverted abasic residues (invAb) are added to the 3′ end of the sense strand. In some embodiments, one or more inverted abasic residues (invAb) are added to the 5′ end of the sense strand. In some embodiments, one or more inverted abasic residues or inverted abasic sites are inserted between the targeting ligand and the nucleotide sequence of the sense strand of the RNAi agent. In some embodiments, the inclusion of one or more inverted abasic residues or inverted abasic sites at or near the terminal end or terminal ends of the sense strand of an RNAi agent allows for enhanced activity or other desired properties of an RNAi agent.

[0125] In some embodiments, one or more inverted abasic residues (invAb) are added to the 5′ end of the sense strand. In some embodiments, one or more inverted abasic residues can be inserted between the targeting ligand and the nucleotide sequence of the sense strand of the RNAi agent. The inverted abasic residues may be linked via phosphate, phosphorothioate (e.g., shown herein as (invAb)s)), or other internucleoside linkages. In some embodiments, the inclusion of one or more inverted abasic residues at or near the terminal end or terminal ends of the sense strand of an RNAi agent may allow for enhanced activity or other desired properties of an RNAi agent. In some embodiments, an inverted abasic (deoxyribose) residue can be replaced with an inverted ribitol (abasic ribose) residue. In some embodiments, the 3′ end of the antisense strand core stretch sequence, or the 3′ end of the antisense strand sequence, may include an inverted abasic residue. The chemical structures for inverted abasic deoxyribose residues are shown in Table 11 below.

### CoV RNAi Agents

[0126] The CoV RNAi agents disclosed herein are designed to target specific positions on a SARS-CoV-2 viral genome (e.g., SEQ ID NO:1 (NC_045512.2), and these specific targeted positions were selected because they also had sequences believed to be conserved across various other CoV genomes. As defined herein, an antisense strand sequence is designed to target a SARS-CoV-2 viral genome at a given position on the genome when the 5′ terminal nucleobase of the antisense strand is aligned with a position that is 21 nucleotides downstream (towards the 3′ end) from the position on the genome when base pairing to the gene or viral genome. For example, as illustrated in Tables 1 and 2 herein, an antisense strand sequence designed to target a SARS-CoV-2 genome at position 29150 requires that when base pairing to the genome, the 5′ terminal nucleobase of the antisense strand is aligned with position 29170 of a SARS-CoV-2 genome.

[0127] As provided herein, a CoV RNAi agent does not require that the nucleobase at position 1 (5′→3′) of the antisense strand be complementary to the viral genome, provided that there is at least 85% complementarity (e.g., at least 85, 86, 87, 88, 89, 90, 91, 92, 93, 94, 95, 96, 97, 98, 99, or 100% complementarity) of the antisense strand and the viral genome across a core stretch sequence of at least 17 consecutive nucleotides. For example, for a CoV RNAi agent disclosed herein that is designed to target position 29150 of a SARS-CoV-2 viral genome, the 5′ terminal nucleobase of the antisense strand of the of the CoV RNAi agent must be aligned with position 29170 of the genome; however, the 5′ terminal nucleobase of the antisense strand may be, but is not required to be, complementary to position 29170 of a SARS-CoV-2 viral genome, provided that there is at least 85% complementarity (e.g., at least 85, 86, 87, 88, 89, 90, 91, 92, 93, 94, 95, 96, 97, 98, 99, or 100% complementarity) of the antisense strand and the viral genome transcript across a core stretch sequence of at least 17 consecutive nucleotides. As shown by, among other things, the various examples disclosed herein, the specific site of binding of the genome by the antisense strand of the CoV RNAi agent (e.g., whether the CoV RNAi agent is designed to target a SARS-CoV-2 viral genome at position 29150, at position 4156, at position 6412, at position 4917, or at some other position) is an important factor to the level of inhibition achieved by the CoV RNAi agent. (See, e.g., Kamola et al., The siRNA Non-seed Region and Its Target Sequences are Auxiliary Determinants of Off-Target Effects, PLOS Computational Biology, 11(12), FIG. 1 (2015)).

[0128] In some embodiments, the CoV RNAi agents disclosed herein target a SARS-CoV-2 viral genome at or near the positions of the SARS-CoV-2 sequence shown in Table 1. In some embodiments, the antisense strand of a CoV RNAi agent disclosed herein includes a core stretch sequence that is fully, substantially, or at least partially complementary to a target SARS-CoV-2 19-mer sequence disclosed in Table 1.

TABLE 1
SARS-COV-2 19-mer Target Sequences (taken from severe acute respiratory
syndrome coronavirus 2 isolate Wuhan-Hu-1, complete genome (NC_045512.2)(SEQ ID
NO: 1))

| | | | Targeted Viral |
|---|---|---|---|
| | SARS-COV-2 19-mer | Corresponding | Genome Position |
| SEQ ID | Target Sequences | Positions of Sequence | (as referred to |
| No. | (5′ → 3′) | on SEQ ID NO: 1 | herein) |
| 2 | CUGUGGUUAUACCUACUAA | 4158-4176 | 4156 |
| 3 | ACAAGGAACUGAUUACAAA | 29152-29170 | 29150 |

[0129] SARS-CoV-2 severe acute respiratory syndrome coronavirus 2 isolate Wuhan-Hu-1, complete genome (NC_045512.2) (SEQ ID NO:1), viral genome transcript (29903 bases):

| | |
|---|---|
| 1 | attaaaggtt tataccttcc caggtaacaa accaaccaac tttcgatctc ttgtagatct |
| 61 | gttctctaaa cgaactttaa aatctgtgtg gctgtcactc ggctgcatgc ttagtgcact |
| 121 | cacgcagtat aattaataac taattactgt cgttgacagg acacgagtaa ctcgtctatc |
| 181 | ttctgcaggc tgcttacggt ttcgtccgtg ttgcagccga tcatcagcac atctaggttt |
| 241 | cgtccgggtg tgaccgaaag gtaagatgga gagccttgtc cctggtttca acgagaaaac |
| 301 | acacgtccaa ctcagtttgc ctgttttaca ggttcgcgac gtgctcgtac gtggctttgg |
| 361 | agactccgtg gaggaggtct tatcagaggc acgtcaacat cttaaagatg gcacttgtgg |
| 421 | cttagtagaa gttgaaaaag gcgttttgcc tcaacttgaa cagccctatg tgttcatcaa |
| 481 | acgttcggat gctcgaactg cacctcatgg tcatgttatg gttgagctgg tagcagaact |
| 541 | cgaaggcatt cagtacggtc gtagtggtga gacacttggt gtccttgtcc ctcatgtggg |
| 601 | cgaaatacca gtggcttacc gcaaggttct tcttcgtaag aacggtaata aaggagctgg |
| 661 | tggccatagt tacggcgccg atctaaagtc atttgactta ggcgacgagc ttggcactga |
| 721 | tccttatgaa gattttcaag aaaactggaa cactaaacat agcagtggtg ttacccgtga |
| 781 | actcatgcgt gagcttaacg gaggggcata cactcgctat gtcgataaca acttctgtgg |
| 841 | ccctgatggc taccctcttg agtgcattaa agaccttcta gcacgtgctg gtaaagcttc |
| 901 | atgcactttg tccgaacaac tggactttat tgacactaag aggggtgtat actgctgccg |
| 961 | tgaacatgag catgaaattg cttggtacac ggaacgttct gaaaagagct atgaattgca |
| 1021 | gacacctttt gaaattaaat tggcaaagaa atttgacacc ttcaatgggg aatgtccaaa |
| 1081 | ttttgtattt cccttaaatt ccataatcaa gactattcaa ccaagggttg aaaagaaaaa |
| 1141 | gcttgatggc tttatgggta gaattcgatc tgtctatcca gttgcgtcac caaatgaatg |
| 1201 | caaccaaatg tgcctttcaa ctctcatgaa gtgtgatcat tgtggtgaaa cttcatggca |
| 1261 | gacgggcgat tttgttaaag ccacttgcga attttgtggc actgagaatt tgactaaaga |
| 1321 | aggtgccact acttgtggtt acttacccca aaatgctgtt gttaaaattt attgtccagc |
| 1381 | atgtcacaat tcagaagtag gacctgagca tagtcttgcc gaataccata atgaatctgg |
| 1441 | cttgaaaacc attcttcgta agggtggtcg cactattgcc tttggaggct gtgtgttctc |
| 1501 | ttatgttggt tgccataaca agtgtgccta ttgggttcca cgtgctagcg ctaacatagg |
| 1561 | ttgtaaccat acaggtgttg ttggagaagg ttccgaaggt cttaatgaca accttcttga |
| 1621 | aatactccaa aaagagaaag tcaacatcaa tattgttggt gactttaaac ttaatgaaga |
| 1681 | gatcgccatt attttggcat ctttttctgc ttccacaagt gcttttgtgg aaactgtgaa |
| 1741 | aggtttggat tataaagcat tcaaacaaat tgttgaatcc tgtggtaatt ttaaagttac |
| 1801 | aaaaggaaaa gctaaaaaag gtgcctggaa tattggtgaa cagaaatcaa tactgagtcc |
| 1861 | tctttatgca tttgcatcag aggctgctcg tgttgtacga tcaattttct cccgcactct |
| 1921 | tgaaactgct caaaattctg tgcgtgtttt acagaaggcc gctataacaa tactagatgg |
| 1981 | aatttcacag tattcactga gactcattga tgctatgatg ttcacatctg atttggctac |
| 2041 | taacaatcta gttgtaatgg cctacattac aggtggtgtt gttcagttga cttcgcagtg |
| 2101 | gctaactaac atctttggca ctgtttatga aaaactcaaa cccgtccttg attggcttga |
| 2161 | agagaagttt aaggaaggtg tagagtttct tagagacggt tgggaaattg ttaaatttat |
| 2221 | ctcaacctgt gcttgtgaaa ttgtcggtgg acaaattgtc acctgtgcaa aggaaattaa |
| 2281 | ggagagtgtt cagacattct ttaagcttgt aaataaattt ttggctttgt gtgctgactc |
| 2341 | tatcattatt ggtggagcta aacttaaagc cttgaattta ggtgaaacat ttgtcacgca |
| 2401 | ctcaaaggga ttgtacagaa agtgtgttaa atccagagaa gaaactggcc tactcatgcc |
| 2461 | tctaaaagcc ccaaaagaaa ttatcttctt agagggagaa acacttccca cagaagtgtt |
| 2521 | aacagaggaa gttgtcttga aaactggtga tttacaacca ttagaacaac ctactagtga |
| 2581 | agctgttgaa gctccattgg ttggtacacc agtttgtatt aacgggctta tgttgctcga |
| 2641 | aatcaaagac acagaaaagt actgtgccct tgcacctaat atgatggtaa caaacaatac |
| 2701 | cttcacactc aaaggcggtg caccaacaaa ggttactttt ggtgatgaca ctgtgataga |
| 2761 | agtgcaaggt tacaagagtg tgaatatcac ttttgaactt gatgaaagga ttgataaagt |
| 2821 | acttaatgag aagtgctctg cctatacagt tgaactcggt acagaagtaa atgagttcgc |
| 2881 | ctgtgttgtg gcagatgctg tcataaaaac tttgcaacca gtatctgaat tacttacacc |
| 2941 | actgggcatt gatttagatg agtggagtat ggctacatac tacttatttg atgagtctgg |
| 3001 | tgagtttaaa ttggcttcac atatgtattg ttctttctac cctccagatg aggatgaaga |
| 3061 | agaaggtgat tgtgaagaag aagagtttga gccatcaact caatatgagt atggtactga |
| 3121 | agatgattac caaggtaaac ctttggaatt tggtgccact tctgctgctc ttcaacctga |
| 3181 | agaagagcaa gaagaagatt ggttagatga tgatagtcaa caaactgttg gtcaacaaga |
| 3241 | cggcagtgag gacaatcaga caactactat tcaaacaatt gttgaggttc aacctcaatt |
| 3301 | agagatggaa cttacaccag ttgttcagac tattgaagtg aatagtttta gtggttattt |
| 3361 | aaaacttact gacaatgtat acattaaaaa tgcagacatt gtggaagaag ctaaaaaggt |
| 3421 | aaaaccaaca gtggttgtta atgcagccaa tgtttacctt aaacatggag gaggtgttgc |
| 3481 | aggagcctta aataaggcta ctaacaatgc catgcaagtt gaatctgatg attacatagc |
| 3541 | tactaatgga ccacttaaag tgggtggtag ttgtgtttta agcggacaca atcttgctaa |
| 3601 | acactgtctt catgttgtcg gcccaaatgt taacaaaggt gaagacattc aacttcttaa |
| 3661 | gagtgcttat gaaaatttta atcagcacga agttctactt gcaccattat tatcagctgg |
| 3721 | tatttttggt gctgacccta tacattcttt aagagtttgt gtagatactg ttcgcacaaa |
| 3781 | tgtctactta gctgtctttg ataaaaatct ctatgacaaa cttgtttcaa gctttttgga |
| 3841 | aatgaagagt gaaaagcaag ttgaacaaaa gatcgctgag attcctaaag aggaagttaa |
| 3901 | gccatttata actgaaagta aaccttcagt tgaacagaga aaacaagatg ataagaaaat |
| 3961 | caaagcttgt gttgaagaag ttacaacaac tctggaagaa actaagttcc tcacagaaaa |
| 4021 | cttgttactt tatattgaca ttaatggcaa tcttcatcca gattctgcca ctcttgttag |
| 4081 | tgacattgac atcactttct taaagaaaga tgctccatat atagtgggtg atgttgttca |
| 4141 | agagggtgtt ttaactgctg tggttatacc tactaaaaag gctggtggca ctactgaaat |
| 4201 | gctagcgaaa gctttgagaa aagtgccaac agacaattat ataaccactt acccgggtca |
| 4261 | gggtttaaat ggttacactg tagaggaggc aaagacagtg cttaaaaagt gtaaaagtgc |
| 4321 | cttttacatt ctaccatcta ttatctctaa tgagaagcaa gaaattcttg gaactgtttc |
| 4381 | ttggaatttg cgagaaatgc ttgcacatgc agaagaaaca cgcaaattaa tgcctgtctg |
| 4441 | tgtggaaact aaagccatag tttcaactat acagcgtaaa tataagggta ttaaaataca |
| 4501 | agagggtgtg gttgattatg gtgctagatt ttacttttac accagtaaaa caactgtagc |
| 4561 | gtcacttatc aacacactta acgatctaaa tgaaactctt gttacaatgc cacttggcta |
| 4621 | tgtaacacat ggcttaaatt tggaagaagc tgctcggtat atgagatctc tcaaagtgcc |
| 4681 | agctacagtt tctgtttctt cacctgatgc tgttacagcg tataatggtt atcttacttc |
| 4741 | ttcttctaaa acacctgaag aacattttat tgaaaccatc tcacttgctg gttcctataa |
| 4801 | agattggtcc tattctggac aatctacaca actaggtata gaatttctta agagaggtga |
| 4861 | taaaagtgta tattacacta gtaatcctac cacattccac ctagatggtg aagttatcac |
| 4921 | ctttgacaat cttaagacac ttctttcttt gagagaagtg aggactatta aggtgtttac |
| 4981 | aacagtagac aacattaacc tccacacgca agttgtggac atgtcaatga catatggaca |
| 5041 | acagtttggt ccaacttatt tggatggagc tgatgttact aaaataaaac ctcataattc |
| 5101 | acatgaaggt aaaacatttt atgttttacc taatgatgac actctacgtg ttgaggcttt |
| 5161 | tgagtactac cacacaactg atcctagttt tctgggtagg tacatgtcag cattaaatca |
| 5221 | cactaaaaag tggaaatacc cacaagttaa tggtttaact tctattaaat gggcagataa |
| 5281 | caactgttat cttgccactg cattgttaac actccaacaa atagagttga agtttaatcc |
| 5341 | acctgctcta caagatgctt attacagagc aagggctggt gaagctgcta acttttgtgc |
| 5401 | acttatctta gcctactgta ataagacagt aggtgagtta ggtgatgtta gagaaacaat |
| 5461 | gagttacttg tttcaacatg ccaatttaga ttcttgcaaa agagtcttga acgtggtgtg |
| 5521 | taaaacttgt ggacaacagc agacaaccct taagggtgta gaagctgtta tgtacatggg |
| 5581 | cacactttct tatgaacaat ttaagaaagg tgttcagata ccttgtacgt gtggtaaaca |
| 5641 | agctacaaaa tatctagtac aacaggagtc accttttgtt atgatgtcag caccacctgc |
| 5701 | tcagtatgaa cttaagcatg gtacatttac ttgtgctagt gagtacactg gtaattacca |
| 5761 | gtgtggtcac tataaacata taacttctaa agaaactttg tattgcatag acggtgcttt |
| 5821 | acttacaaag tcctcagaat acaaaggtcc tattacggat gttttctaca aagaaaacag |
| 5881 | ttacacaaca accataaaac cagttactta taaattggat ggtgttgttt gtacagaaat |
| 5941 | tgaccctaag ttggacaatt attataagaa agacaattct tatttcacag agcaaccaat |
| 6001 | tgatcttgta ccaaaccaac catatccaaa cgcaagcttc gataatttta agtttgtatg |
| 6061 | tgataatatc aaatttgctg atgatttaaa ccagttaact ggttataaga aacctgcttc |
| 6121 | aagagagctt aaagttacat ttttccctga cttaaatggt gatgtggtgg ctattgatta |
| 6181 | taaacactac acaccctctt ttaagaaagg agctaaattg ttacataaac ctattgtttg |
| 6241 | gcatgttaac aatgcaacta ataaagccac gtataaacca aatacctggt gtatacgttg |
| 6301 | tctttggagc acaaaaccag ttgaaacatc aaattcgttt gatgtactga agtcagagga |
| 6361 | cgcgcaggga atggataatc ttgcctgcga agatctaaaa ccagtctctg aagaagtagt |
| 6421 | ggaaaatcct accatacaga aagacgttct tgagtgtaat gtgaaaacta ccgaagttgt |
| 6481 | aggagacatt atacttaaac cagcaaataa tagtttaaaa attacagaag aggttggcca |
| 6541 | cacagatcta atggctgctt atgtagacaa ttctagtctt actattaaga aacctaatga |
| 6601 | attatctaga gtattaggtt tgaaaaccct tgctactcat ggtttagctg ctgttaatag |
| 6661 | tgtcccttgg gatactatag ctaattatgc taagcctttt cttaacaaag ttgttagtac |
| 6721 | aactactaac atagttacac ggtgtttaaa ccgtgtttgt actaattata tgccttattt |
| 6781 | ctttacttta ttgctacaat tgtgtacttt tactagaagt acaaattcta gaattaaagc |
| 6841 | atctatgccg actactatag caaagaatac tgttaagagt gtcggtaaat tttgtctaga |
| 6901 | ggcttcattt aattatttga agtcacctaa tttttctaaa ctgataaata ttataatttg |
| 6961 | gtttttacta ttaagtgttt gcctaggttc tttaatctac tcaaccgctg ctttaggtgt |
| 7021 | tttaatgtct aatttaggca tgccttctta ctgtactggt tacagagaag gctatttgaa |
| 7081 | ctctactaat gtcactattg caacctactg tactggttct ataccttgta gtgtttgtct |
| 7141 | tagtggttta gattctttag acacctatcc ttctttagaa actatacaaa ttaccatttc |
| 7201 | atcttttaaa tgggatttaa ctgcttttgg cttagttgca gagtggtttt tggcatatat |
| 7261 | tcttttcact aggtttttct atgtacttgg attggctgca atcatgcaat tgtttttcag |
| 7321 | ctattttgca gtacatttta ttagtaattc ttggcttatg tggttaataa ttaatcttgt |
| 7381 | acaaatggcc ccgatttcag ctatggttag aatgtacatc ttctttgcat cattttatta |
| 7441 | tgtatggaaa agttatgtgc atgttgtaga cggttgtaat tcatcaactt gtatgatgtg |
| 7501 | ttacaaacgt aatagagcaa caagagtcga atgtacaact attgttaatg gtgttagaag |
| 7561 | gtccttttat gtctatgcta atggaggtaa aggcttttgc aaactacaca attggaattg |
| 7621 | tgttaattgt gatacattct gtgctggtag tacatttatt agtgatgaag ttgcgagaga |
| 7681 | cttgtcacta cagtttaaaa gaccaataaa tcctactgac cagtcttctt acatcgttga |
| 7741 | tagtgttaca gtgaagaatg gttccatcca tctttacttt gataaagctg gtcaaaagac |
| 7801 | ttatgaaaga cattctctct ctcattttgt taacttagac aacctgagag ctaataacac |
| 7861 | taaaggttca ttgcctatta atgttatagt ttttgatggt aaatcaaaat gtgaagaatc |
| 7921 | atctgcaaaa tcagcgtctg tttactacag tcagcttatg tgtcaaccta tactgttact |
| 7981 | agatcaggca ttagtgtctg atgttggtga tagtgcggaa gttgcagtta aaatgtttga |
| 8041 | tgcttacgtt aatacgtttt catcaacttt taacgtacca atggaaaaac tcaaaacact |
| 8101 | agttgcaact gcagaagctg aacttgcaaa gaatgtgtcc ttagacaatg tcttatctac |
| 8161 | ttttatttca gcagctcggc aagggtttgt tgattcagat gtagaaacta aagatgttgt |
| 8221 | tgaatgtctt aaattgtcac atcaatctga catagaagtt actggcgata gttgtaataa |
| 8281 | ctatatgctc acctataaca aagttgaaaa catgacaccc cgtgaccttg gtgcttgtat |
| 8341 | tgactgtagt gcgcgtcata ttaatgcgca ggtagcaaaa agtcacaaca ttgctttgat |
| 8401 | atggaacgtt aaagatttca tgtcattgtc tgaacaacta cgaaaacaaa tacgtagtgc |
| 8461 | tgctaaaaag aataacttac cttttaagtt gacatgtgca actactagac aagttgttaa |
| 8521 | tgttgtaaca acaaagatag cacttaaggg tggtaaaatt gttaataatt ggttgaagca |
| 8581 | gttaattaaa gttacacttg tgttcctttt tgttgctgct attttctatt taataacacc |
| 8641 | tgttcatgtc atgtctaaac atactgactt ttcaagtgaa atcataggat acaaggctat |
| 8701 | tgatggtggt gtcactcgtg acatagcatc tacagatact tgttttgcta acaaacatgc |
| 8761 | tgattttgac acatggttta gccagcgtgg tggtagttat actaatgaca aagcttgccc |
| 8821 | attgattgct gcagtcataa caagagaagt gggttttgtc gtgcctggtt tgcctggcac |
| 8881 | gatattacgc acaactaatg gtgacttttt gcatttctta cctagagttt ttagtgcagt |
| 8941 | tggtaacatc tgttacacac catcaaaact tatagagtac actgactttg caacatcagc |
| 9001 | ttgtgttttg gctgctgaat gtacaatttt taaagatgct tctggtaagc cagtaccata |
| 9061 | ttgttatgat accaatgtac tagaaggttc tgttgcttat gaaagtttac gccctgacac |
| 9121 | acgttatgtg ctcatggatg gctctattat tcaatttcct aacacctacc ttgaaggttc |
| 9181 | tgttagagtg gtaacaactt ttgattctga gtactgtagg cacggcactt gtgaaagatc |
| 9241 | agaagctggt gtttgtgtat ctactagtgg tagatgggta cttaacaatg attattacag |
| 9301 | atctttacca ggagttttct gtggtgtaga tgctgtaaat ttacttacta atatgtttac |
| 9361 | accactaatt caacctattg gtgctttgga catatcagca tctatagtag ctggtggtat |
| 9421 | tgtagctatc gtagtaacat gccttgccta ctattttatg aggtttagaa gagcttttgg |
| 9481 | tgaatacagt catgtagttg cctttaatac tttactattc cttatgtcat tcactgtact |
| 9541 | ctgtttaaca ccagtttact cattcttacc tggtgtttat tctgttattt acttgtactt |
| 9601 | gacattttat cttactaatg atgtttcttt tttagcacat attcagtgga tggttatgtt |
| 9661 | cacaccttta gtacctttct ggataacaat tgcttatatc atttgtattt ccacaaagca |
| 9721 | tttctattgg ttctttagta attacctaaa gagacgtgta gtctttaatg gtgtttcctt |
| 9781 | tagtactttt gaagaagctg cgctgtgcac ctttttgtta aataaagaaa tgtatctaaa |
| 9841 | gttgcgtagt gatgtgctat tacctcttac gcaatataat agatacttag ctctttataa |
| 9901 | taagtacaag tattttagtg gagcaatgga tacaactagc tacagagaag ctgcttgttg |
| 9961 | tcatctcgca aaggctctca atgacttcag taactcaggt tctgatgttc tttaccaacc |
| 10021 | accacaaacc tctatcacct cagctgtttt gcagagtggt tttagaaaaa tggcattccc |
| 10081 | atctggtaaa gttgagggtt gtatggtaca agtaacttgt ggtacaacta cacttaacgg |
| 10141 | tctttggctt gatgacgtag tttactgtcc aagacatgtg atctgcacct ctgaagacat |
| 10201 | gcttaaccct aattatgaag atttactcat tcgtaagtct aatcataatt tcttggtaca |
| 10261 | ggctggtaat gttcaactca gggttattgg acattctatg caaaattgtg tacttaagct |
| 10321 | taaggttgat acagccaatc ctaagacacc taagtataag tttgttcgca ttcaaccagg |
| 10381 | acagactttt tcagtgttag cttgttacaa tggttcacca tctggtgttt accaatgtgc |
| 10441 | tatgaggccc aatttcacta ttaagggttc attccttaat ggttcatgtg gtagtgttgg |
| 10501 | ttttaacata gattatgact gtgtctcttt ttgttacatg caccatatgg aattaccaac |
| 10561 | tggagttcat gctggcacag acttagaagg taacttttat ggaccttttg ttgacaggca |
| 10621 | aacagcacaa gcagctggta cggacacaac tattacagtt aatgttttag cttggttgta |
| 10681 | cgctgctgtt ataaatggag acaggtggtt tctcaatcga tttaccacaa ctcttaatga |
| 10741 | ctttaacctt gtggctatga agtacaatta tgaacctcta acacaagacc atgttgacat |
| 10801 | actaggacct ctttctgctc aaactggaat tgccgtttta gatatgtgtg cttcattaaa |
| 10861 | agaattactg caaaatggta tgaatggacg taccatattg ggtagtgctt tattagaaga |
| 10921 | tgaatttaca ccttttgatg ttgttagaca atgctcaggt gttactttcc aaagtgcagt |
| 10981 | gaaaagaaca atcaagggta cacaccactg gttgttactc acaattttga cttcactttt |
| 11041 | agttttagtc cagagtactc aatggtcttt gttctttttt ttgtatgaaa atgccttttt |
| 11101 | accttttgct atgggtatta ttgctatgtc tgcttttgca atgatgtttg tcaaacataa |
| 11161 | gcatgcattt ctctgtttgt ttttgttacc ttctcttgcc actgtagctt attttaatat |
| 11221 | ggtctatatg cctgctagtt gggtgatgcg tattatgaca tggttggata tggttgatac |
| 11281 | tagtttgtct ggttttaagc taaaagactg tgttatgtat gcatcagctg tagtgttact |
| 11341 | aatccttatg acagcaagaa ctgtgtatga tgatggtgct aggagagtgt ggacacttat |
| 11401 | gaatgtcttg acactcgttt ataaagttta ttatggtaat gctttagatc aagccatttc |
| 11461 | catgtgggct cttataatct ctgttacttc taactactca ggtgtagtta caactgtcat |
| 11521 | gtttttggcc agaggtattg tttttatgtg tgttgagtat tgccctattt tcttcataac |
| 11581 | tggtaataca cttcagtgta taatgctagt ttattgtttc ttaggctatt tttgtacttg |
| 11641 | ttactttggc ctcttttgtt tactcaaccg ctactttaga ctgactcttg gtgtttatga |
| 11701 | ttacttagtt tctacacagg agtttagata tatgaattca cagggactac tcccacccaa |
| 11761 | gaatagcata gatgccttca aactcaacat taaattgttg ggtgttggtg gcaaaccttg |
| 11821 | tatcaaagta gccactgtac agtctaaaat gtcagatgta aagtgcacat cagtagtctt |
| 11881 | actctcagtt ttgcaacaac tcagagtaga atcatcatct aaattgtggg ctcaatgtgt |
| 11941 | ccagttacac aatgacattc tcttagctaa agatactact gaagcctttg aaaaaatggt |
| 12001 | ttcactactt tctgttttgc tttccatgca gggtgctgta gacataaaca agctttgtga |
| 12061 | agaaatgctg gacaacaggg caaccttaca agctatagcc tcagagttta gttcccttcc |
| 12121 | atcatatgca gcttttgcta ctgctcaaga agcttatgag caggctgttg ctaatggtga |
| 12181 | ttctgaagtt gttcttaaaa agttgaagaa gtctttgaat gtggctaaat ctgaatttga |
| 12241 | ccgtgatgca gccatgcaac gtaagttgga aaagatggct gatcaagcta tgacccaaat |
| 12301 | gtataaacag gctagatctg aggacaagag ggcaaaagtt actagtgcta tgcagacaat |
| 12361 | gcttttcact atgcttagaa agttggataa tgatgcactc aacaacatta tcaacaatgc |
| 12421 | aagagatggt tgtgttccct tgaacataat acctcttaca acagcagcca aactaatggt |
| 12481 | tgtcatacca gactataaca catataaaaa tacgtgtgat ggtacaacat ttacttatgc |
| 12541 | atcagcattg tgggaaatcc aacaggttgt agatgcagat agtaaaattg ttcaacttag |
| 12601 | tgaaattagt atggacaatt cacctaattt agcatggcct cttattgtaa cagctttaag |
| 12661 | ggccaattct gctgtcaaat tacagaataa tgagcttagt cctgttgcac tacgacagat |
| 12721 | gtcttgtgct gccggtacta cacaaactgc ttgcactgat gacaatgcgt tagcttacta |
| 12781 | caacacaaca aagggaggta ggtttgtact tgcactgtta tccgatttac aggatttgaa |
| 12841 | atgggctaga ttccctaaga gtgatggaac tggtactatc tatacagaac tggaaccacc |
| 12901 | ttgtaggttt gttacagaca cacctaaagg tcctaaagtg aagtatttat actttattaa |
| 12961 | aggattaaac aacctaaata gaggtatggt acttggtagt ttagctgcca cagtacgtct |
| 13021 | acaagctggt aatgcaacag aagtgcctgc caattcaact gtattatctt tctgtgcttt |
| 13081 | tgctgtagat gctgctaaag cttacaaaga ttatctagct agtgggggac aaccaatcac |
| 13141 | taattgtgtt aagatgttgt gtacacacac tggtactggt caggcaataa cagttacacc |
| 13201 | ggaagccaat atggatcaag aatcctttgg tggtgcatcg tgttgtctgt actgccgttg |
| 13261 | ccacatagat catccaaatc ctaaaggatt ttgtgactta aaaggtaagt atgtacaaat |
| 13321 | acctacaact tgtgctaatg accctgtggg ttttacactt aaaaacacag tctgtaccgt |
| 13381 | ctgcggtatg tggaaaggtt atggctgtag ttgtgatcaa ctccgcgaac ccatgcttca |
| 13441 | gtcagctgat gcacaatcgt ttttaaacgg gtttgcggtg taagtgcagc ccgtcttaca |
| 13501 | ccgtgcggca caggcactag tactgatgtc gtatacaggg cttttgacat ctacaatgat |
| 13561 | aaagtagctg gttttgctaa attcctaaaa actaattgtt gtcgcttcca agaaaaggac |
| 13621 | gaagatgaca atttaattga ttcttacttt gtagttaaga gacacacttt ctctaactac |
| 13681 | caacatgaag aaacaattta taatttactt aaggattgtc cagctgttgc taaacatgac |
| 13741 | ttctttaagt ttagaataga cggtgacatg gtaccacata tatcacgtca acgtcttact |
| 13801 | aaatacacaa tggcagacct cgtctatgct ttaaggcatt ttgatgaagg taattgtgac |
| 13861 | acattaaaag aaatacttgt cacatacaat tgttgtgatg atgattattt caataaaaag |
| 13921 | gactggtatg attttgtaga aaacccagat atattacgcg tatacgccaa cttaggtgaa |
| 13981 | cgtgtacgcc aagctttgtt aaaaacagta caattctgtg atgccatgcg aaatgctggt |
| 14041 | attgttggtg tactgacatt agataatcaa gatctcaatg gtaactggta tgatttcggt |
| 14101 | gatttcatac aaaccacgcc aggtagtgga gttcctgttg tagattctta ttattcattg |
| 14161 | ttaatgccta tattaacctt gaccagggct ttaactgcag agtcacatgt tgacactgac |
| 14221 | ttaacaaagc cttacattaa gtgggatttg ttaaaatatg acttcacgga agagaggtta |
| 14281 | aaactctttg accgttattt taaatattgg gatcagacat accacccaaa ttgtgttaac |
| 14341 | tgtttggatg acagatgcat tctgcattgt gcaaacttta atgttttatt ctctacagtg |
| 14401 | ttcccaccta caagttttgg accactagtg agaaaaatat ttgttgatgg tgttccattt |
| 14461 | gtagtttcaa ctggatacca cttcagagag ctaggtgttg tacataatca ggatgtaaac |
| 14521 | ttacatagct ctagacttag ttttaaggaa ttacttgtgt atgctgctga ccctgctatg |
| 14581 | cacgctgctt ctggtaatct attactagat aaacgcacta cgtgcttttc agtagctgca |
| 14641 | cttactaaca atgttgcttt tcaaactgtc aaacccggta attttaacaa agacttctat |
| 14701 | gactttgctg tgtctaaggg tttctttaag gaaggaagtt ctgttgaatt aaaacacttc |
| 14761 | ttctttgctc aggatggtaa tgctgctatc agcgattatg actactatcg ttataatcta |
| 14821 | ccaacaatgt gtgatatcag acaactacta tttgtagttg aagttgttga taagtacttt |
| 14881 | gattgttacg atggtggctg tattaatgct aaccaagtca tcgtcaacaa cctagacaaa |
| 14941 | tcagctggtt ttccatttaa taaatggggt aaggctagac tttattatga ttcaatgagt |
| 15001 | tatgaggatc aagatgcact tttcgcatat acaaaacgta atgtcatccc tactataact |
| 15061 | caaatgaatc ttaagtatgc cattagtgca aagaatagag ctcgcaccgt agctggtgtc |
| 15121 | tctatctgta gtactatgac caatagacag tttcatcaaa aattattgaa atcaatagcc |
| 15181 | gccactagag gagctactgt agtaattgga acaagcaaat tctatggtgg ttggcacaac |
| 15241 | atgttaaaaa ctgtttatag tgatgtagaa aaccctcacc ttatgggttg ggattatcct |
| 15301 | aaatgtgata gagccatgcc taacatgctt agaattatgg cctcacttgt tcttgctcgc |
| 15361 | aaacatacaa cgtgttgtag cttgtcacac cgtttctata gattagctaa tgagtgtgct |
| 15421 | caagtattga gtgaaatggt catgtgtggc ggttcactat atgttaaacc aggtggaacc |
| 15481 | tcatcaggag atgccacaac tgcttatgct aatagtgttt ttaacatttg tcaagctgtc |
| 15541 | acggccaatg ttaatgcact tttatctact gatggtaaca aaattgccga taagtatgtc |
| 15601 | cgcaatttac aacacagact ttatgagtgt ctctatagaa atagagatgt tgacacagac |
| 15661 | tttgtgaatg agttttacgc atatttgcgt aaacatttct caatgatgat actctctgac |
| 15721 | gatgctgttg tgtgtttcaa tagcacttat gcatctcaag gtctagtggc tagcataaag |
| 15781 | aactttaagt cagttcttta ttatcaaaac aatgttttta tgtctgaagc aaaatgttgg |
| 15841 | actgagactg accttactaa aggacctcat gaattttgct ctcaacatac aatgctagtt |
| 15901 | aaacagggtg atgattatgt gtaccttcct tacccagatc catcaagaat cctaggggcc |
| 15961 | ggctgttttg tagatgatat cgtaaaaaca gatggtacac ttatgattga acggttcgtg |
| 16021 | tctttagcta tagatgctta cccacttact aaacatccta atcaggagta tgctgatgtc |
| 16081 | tttcatttgt acttacaata cataagaaag ctacatgatg agttaacagg acacatgtta |
| 16141 | gacatgtatt ctgttatgct tactaatgat aacacttcaa ggtattggga acctgagttt |
| 16201 | tatgaggcta tgtacacacc gcatacagtc ttacaggctg ttggggcttg tgttctttgc |
| 16261 | aattcacaga cttcattaag atgtggtgct tgcatacgta gaccattctt atgttgtaaa |
| 16321 | tgctgttacg accatgtcat atcaacatca cataaattag tcttgtctgt taatccgtat |
| 16381 | gtttgcaatg ctccaggttg tgatgtcaca gatgtgactc aactttactt aggaggtatg |
| 16441 | agctattatt gtaaatcaca taaaccaccc attagttttc cattgtgtgc taatggacaa |
| 16501 | gtttttggtt tatataaaaa tacatgtgtt ggtagcgata atgttactga ctttaatgca |
| 16561 | attgcaacat gtgactggac aaatgctggt gattacattt tagctaacac ctgtactgaa |
| 16621 | agactcaagc tttttgcagc agaaacgctc aaagctactg aggagacatt taaactgtct |
| 16681 | tatggtattg ctactgtacg tgaagtgctg tctgacagag aattacatct ttcatgggaa |
| 16741 | gttggtaaac ctagaccacc acttaaccga aattatgtct ttactggtta tcgtgtaact |
| 16801 | aaaaacagta aagtacaaat aggagagtac acctttgaaa aaggtgacta tggtgatgct |
| 16861 | gttgtttacc gaggtacaac aacttacaaa ttaaatgttg gtgattattt tgtgctgaca |
| 16921 | tcacatacag taatgccatt aagtgcacct acactagtgc cacaagagca ctatgttaga |
| 16981 | attactggct tatacccaac actcaatatc tcagatgagt tttctagcaa tgttgcaaat |
| 17041 | tatcaaaagg ttggtatgca aaagtattct acactccagg gaccacctgg tactggtaag |
| 17101 | agtcattttg ctattggcct agctctctac tacccttctg ctcgcatagt gtatacagct |
| 17161 | tgctctcatg ccgctgttga tgcactatgt gagaaggcat taaaatattt gcctatagat |
| 17221 | aaatgtagta gaattatacc tgcacgtgct cgtgtagagt gttttgataa attcaaagtg |
| 17281 | aattcaacat tagaacagta tgtcttttgt actgtaaatg cattgcctga gacgacagca |
| 17341 | gatatagttg tctttgatga aatttcaatg gccacaaatt atgatttgag tgttgtcaat |
| 17401 | gccagattac gtgctaagca ctatgtgtac attggcgacc ctgctcaatt acctgcacca |
| 17461 | cgcacattgc taactaaggg cacactagaa ccagaatatt tcaattcagt gtgtagactt |
| 17521 | atgaaaacta taggtccaga catgttcctc ggaacttgtc ggcgttgtcc tgctgaaatt |
| 17581 | gttgacactg tgagtgcttt ggtttatgat aataagctta aagcacataa agacaaatca |
| 17641 | gctcaatgct ttaaaatgtt ttataagggt gttatcacgc atgatgtttc atctgcaatt |
| 17701 | aacaggccac aaataggcgt ggtaagagaa ttccttacac gtaaccctgc ttggagaaaa |
| 17761 | gctgtcttta tttcacctta taattcacag aatgctgtag cctcaaagat tttgggacta |
| 17821 | ccaactcaaa ctgttgattc atcacagggc tcagaatatg actatgtcat attcactcaa |
| 17881 | accactgaaa cagctcactc ttgtaatgta aacagattta atgttgctat taccagagca |
| 17941 | aaagtaggca tactttgcat aatgtctgat agagaccttt atgacaagtt gcaatttaca |
| 18001 | agtcttgaaa ttccacgtag gaatgtggca actttacaag ctgaaaatgt aacaggactc |
| 18061 | tttaaagatt gtagtaaggt aatcactggg ttacatccta cacaggcacc tacacacctc |
| 18121 | agtgttgaca ctaaattcaa aactgaaggt ttatgtgttg acatacctgg catacctaag |
| 18181 | gacatgacct atagaagact catctctatg atgggtttta aaatgaatta tcaagttaat |
| 18241 | ggttacccta acatgtttat cacccgcgaa gaagctataa gacatgtacg tgcatggatt |
| 18301 | ggcttcgatg tcgaggggtg tcatgctact agagaagctg ttggtaccaa tttaccttta |
| 18361 | cagctaggtt tttctacagg tgttaaccta gttgctgtac ctacaggtta tgttgataca |
| 18421 | cctaataata cagatttttc cagagttagt gctaaaccac cgcctggaga tcaatttaaa |
| 18481 | cacctcatac cacttatgta caaaggactt ccttggaatg tagtgcgtat aaagattgta |
| 18541 | caaatgttaa gtgacacact taaaaatctc tctgacagag tcgtatttgt cttatgggca |
| 18601 | catggctttg agttgacatc tatgaagtat tttgtgaaaa taggacctga gcgcacctgt |
| 18661 | tgtctatgtg atagacgtgc cacatgcttt tccactgctt cagacactta tgcctgttgg |
| 18721 | catcattcta ttggatttga ttacgtctat aatccgttta tgattgatgt tcaacaatgg |
| 18781 | ggttttacag gtaacctaca aagcaaccat gatctgtatt gtcaagtcca tggtaatgca |
| 18841 | catgtagcta gttgtgatgc aatcatgact aggtgtctag ctgtccacga gtgctttgtt |
| 18901 | aagcgtgttg actggactat tgaatatcct ataattggtg atgaactgaa gattaatgcg |
| 18961 | gcttgtagaa aggttcaaca catggttgtt aaagctgcat tattagcaga caaattccca |
| 19021 | gttcttcacg acattggtaa ccctaaagct attaagtgtg tacctcaagc tgatgtagaa |
| 19081 | tggaagttct atgatgcaca gccttgtagt gacaaagctt ataaaataga agaattattc |
| 19141 | tattcttatg ccacacattc tgacaaattc acagatggtg tatgcctatt ttggaattgc |
| 19201 | aatgtcgata gatatcctgc taattccatt gtttgtagat ttgacactag agtgctatct |
| 19261 | aaccttaact tgcctggttg tgatggtggc agtttgtatg taaataaaca tgcattccac |
| 19321 | acaccagctt ttgataaaag tgcttttgtt aatttaaaac aattaccatt tttctattac |
| 19381 | tctgacagtc catgtgagtc tcatggaaaa caagtagtgt cagatataga ttatgtacca |
| 19441 | ctaaagtctg ctacgtgtat aacacgttgc aatttaggtg gtgctgtctg tagacatcat |
| 19501 | gctaatgagt acagattgta tctcgatgct tataacatga tgatctcagc tggctttagc |
| 19561 | ttgtgggttt acaaacaatt tgatacttat aacctctgga acacttttac aagacttcag |
| 19621 | agtttagaaa atgtggcttt taatgttgta aataagggac actttgatgg acaacagggt |
| 19681 | gaagtaccag tttctatcat taataacact gtttacacaa aagttgatgg tgttgatgta |
| 19741 | gaattgtttg aaaataaaac aacattacct gttaatgtag catttgagct ttgggctaag |
| 19801 | cgcaacatta aaccagtacc agaggtgaaa atactcaata atttgggtgt ggacattgct |
| 19861 | gctaatactg tgatctggga ctacaaaaga gatgctccag cacatatatc tactattggt |
| 19921 | gtttgttcta tgactgacat agccaagaaa ccaactgaaa cgatttgtgc accactcact |
| 19981 | gtcttttttg atggtagagt tgatggtcaa gtagacttat ttagaaatgc ccgtaatggt |
| 20041 | gttcttatta cagaaggtag tgttaaaggt ttacaaccat ctgtaggtcc caaacaagct |
| 20101 | agtcttaatg gagtcacatt aattggagaa gccgtaaaaa cacagttcaa ttattataag |
| 20161 | aaagttgatg gtgttgtcca acaattacct gaaacttact ttactcagag tagaaattta |
| 20221 | caagaattta aacccaggag tcaaatggaa attgatttct tagaattagc tatggatgaa |
| 20281 | ttcattgaac ggtataaatt agaaggctat gccttcgaac atatcgttta tggagatttt |
| 20341 | agtcatagtc agttaggtgg tttacatcta ctgattggac tagctaaacg ttttaaggaa |
| 20401 | tcaccttttg aattagaaga ttttattcct atggacagta cagttaaaaa ctatttcata |
| 20461 | acagatgcgc aaacaggttc atctaagtgt gtgtgttctg ttattgattt attacttgat |
| 20521 | gattttgttg aaataataaa atcccaagat ttatctgtag tttctaaggt tgtcaaagtg |
| 20581 | actattgact atacagaaat ttcatttatg ctttggtgta aagatggcca tgtagaaaca |
| 20641 | ttttacccaa aattacaatc tagtcaagcg tggcaaccgg gtgttgctat gcctaatctt |
| 20701 | tacaaaatgc aaagaatgct attagaaaag tgtgaccttc aaaattatgg tgatagtgca |
| 20761 | acattaccta aaggcataat gatgaatgtc gcaaaatata ctcaactgtg tcaatattta |
| 20821 | aacacattaa cattagctgt accctataat atgagagtta tacattttgg tgctggttct |
| 20881 | gataaaggag ttgcaccagg tacagctgtt ttaagacagt ggttgcctac gggtacgctg |
| 20941 | cttgtcgatt cagatcttaa tgactttgtc tctgatgcag attcaacttt gattggtgat |
| 21001 | tgtgcaactg tacatacagc taataaatgg gatctcatta ttagtgatat gtacgaccct |
| 21061 | aagactaaaa atgttacaaa agaaaatgac tctaaagagg gttttttcac ttacatttgt |
| 21121 | gggtttatac aacaaaagct agctcttgga ggttccgtgg ctataaagat aacagaacat |
| 21181 | tcttggaatg ctgatcttta taagctcatg ggacacttcg catggtggac agcctttgtt |
| 21241 | actaatgtga atgcgtcatc atctgaagca tttttaattg gatgtaatta tcttggcaaa |
| 21301 | ccacgcgaac aaatagatgg ttatgtcatg catgcaaatt acatattttg gaggaataca |
| 21361 | aatccaattc agttgtcttc ctattcttta tttgacatga gtaaatttcc ccttaaatta |
| 21421 | aggggtactg ctgttatgtc tttaaaagaa ggtcaaatca atgatatgat tttatctctt |
| 21481 | cttagtaaag gtagacttat aattagagaa aacaacagag ttgttatttc tagtgatgtt |
| 21541 | cttgttaaca actaaacgaa caatgtttgt ttttcttgtt ttattgccac tagtctctag |
| 21601 | tcagtgtgtt aatcttacaa ccagaactca attaccccct gcatacacta attctttcac |
| 21661 | acgtggtgtt tattaccctg acaaagtttt cagatcctca gttttacatt caactcagga |
| 21721 | cttgttctta cctttctttt ccaatgttac ttggttccat gctatacatg tctctgggac |
| 21781 | caatggtact aagaggtttg ataaccctgt cctaccattt aatgatggtg tttattttgc |
| 21841 | ttccactgag aagtctaaca taataagagg ctggattttt ggtactactt tagattcgaa |
| 21901 | gacccagtcc ctacttattg ttaataacgc tactaatgtt gttattaaag tctgtgaatt |
| 21961 | tcaattttgt aatgatccat ttttgggtgt ttattaccac aaaaacaaca aaagttggat |
| 22021 | ggaaagtgag ttcagagttt attctagtgc gaataattgc acttttgaat atgtctctca |
| 22081 | gccttttctt atggaccttg aaggaaaaca gggtaatttc aaaaatctta gggaatttgt |
| 22141 | gtttaagaat attgatggtt attttaaaat atattctaag cacacgccta ttaatttagt |
| 22201 | gcgtgatctc cctcagggtt tttcggcttt agaaccattg gtagatttgc caataggtat |
| 22261 | taacatcact aggtttcaaa ctttacttgc tttacataga agttatttga ctcctggtga |
| 22321 | ttcttcttca ggttggacag ctggtgctgc agcttattat gtgggttatc ttcaacctag |
| 22381 | gacttttcta ttaaaatata atgaaaatgg aaccattaca gatgctgtag actgtgcact |
| 22441 | tgaccctctc tcagaaacaa agtgtacgtt gaaatccttc actgtagaaa aaggaatcta |
| 22501 | tcaaacttct aactttagag tccaaccaac agaatctatt gttagatttc ctaatattac |
| 22561 | aaacttgtgc ccttttggtg aagtttttaa cgccaccaga tttgcatctg tttatgcttg |
| 22621 | gaacaggaag agaatcagca actgtgttgc tgattattct gtcctatata attccgcatc |
| 22681 | attttccact tttaagtgtt atggagtgtc tcctactaaa ttaaatgatc tctgctttac |
| 22741 | taatgtctat gcagattcat ttgtaattag aggtgatgaa gtcagacaaa tcgctccagg |
| 22801 | gcaaactgga aagattgctg attataatta taaattacca gatgatttta caggctgcgt |
| 22861 | tatagcttgg aattctaaca atcttgattc taaggttggt ggtaattata attacctgta |
| 22921 | tagattgttt aggaagtcta atctcaaacc ttttgagaga gatatttcaa ctgaaatcta |
| 22981 | tcaggccggt agcacacctt gtaatggtgt tgaaggtttt aattgttact ttcctttaca |
| 23041 | atcatatggt ttccaaccca ctaatggtgt tggttaccaa ccatacagag tagtagtact |
| 23101 | ttcttttgaa cttctacatg caccagcaac tgtttgtgga cctaaaaagt ctactaattt |
| 23161 | ggttaaaaac aaatgtgtca atttcaactt caatggttta acaggcacag gtgttcttac |
| 23221 | tgagtctaac aaaaagtttc tgcctttcca acaatttggc agagacattg ctgacactac |
| 23281 | tgatgctgtc cgtgatccac agacacttga gattcttgac attacaccat gttcttttgg |
| 23341 | tggtgtcagt gttataacac caggaacaaa tacttctaac caggttgctg ttctttatca |
| 23401 | ggatgttaac tgcacagaag tccctgttgc tattcatgca gatcaactta ctcctacttg |
| 23461 | gcgtgtttat tctacaggtt ctaatgtttt tcaaacacgt gcaggctgtt taataggggc |
| 23521 | tgaacatgtc aacaactcat atgagtgtga catacccatt ggtgcaggta tatgcgctag |
| 23581 | ttatcagact cagactaatt ctcctcggcg ggcacgtagt gtagctagtc aatccatcat |
| 23641 | tgcctacact atgtcacttg gtgcagaaaa ttcagttgct tactctaata actctattgc |
| 23701 | catacccaca aattttacta ttagtgttac cacagaaatt ctaccagtgt ctatgaccaa |
| 23761 | gacatcagta gattgtacaa tgtacatttg tggtgattca actgaatgca gcaatctttt |
| 23821 | gttgcaatat ggcagttttt gtacacaatt aaaccgtgct ttaactggaa tagctgttga |
| 23881 | acaagacaaa aacacccaag aagtttttgc acaagtcaaa caaatttaca aaacaccacc |
| 23941 | aattaaagat tttggtggtt ttaatttttc acaaatatta ccagatccat caaaaccaag |
| 24001 | caagaggtca tttattgaag atctactttt caacaaagtg acacttgcag atgctggctt |
| 24061 | catcaaacaa tatggtgatt gccttggtga tattgctgct agagacctca tttgtgcaca |
| 24121 | aaagtttaac ggccttactg ttttgccacc tttgctcaca gatgaaatga ttgctcaata |
| 24181 | cacttctgca ctgttagcgg gtacaatcac ttctggttgg acctttggtg caggtgctgc |
| 24241 | attacaaata ccatttgcta tgcaaatggc ttataggttt aatggtattg gagttacaca |
| 24301 | gaatgttctc tatgagaacc aaaaattgat tgccaaccaa tttaatagtg ctattggcaa |
| 24361 | aattcaagac tcactttctt ccacagcaag tgcacttgga aaacttcaag atgtggtcaa |
| 24421 | ccaaaatgca caagctttaa acacgcttgt taaacaactt agctccaatt ttggtgcaat |
| 24481 | ttcaagtgtt ttaaatgata tcctttcacg tcttgacaaa gttgaggctg aagtgcaaat |
| 24541 | tgataggttg atcacaggca gacttcaaag tttgcagaca tatgtgactc aacaattaat |
| 24601 | tagagctgca gaaatcagag cttctgctaa tcttgctgct actaaaatgt cagagtgtgt |
| 24661 | acttggacaa tcaaaaagag ttgatttttg tggaaagggc tatcatctta tgtccttccc |
| 24721 | tcagtcagca cctcatggtg tagtcttctt gcatgtgact tatgtccctg cacaagaaaa |
| 24781 | gaacttcaca actgctcctg ccatttgtca tgatggaaaa gcacactttc ctcgtgaagg |
| 24841 | tgtctttgtt tcaaatggca cacactggtt tgtaacacaa aggaattttt atgaaccaca |
| 24901 | aatcattact acagacaaca catttgtgtc tggtaactgt gatgttgtaa taggaattgt |
| 24961 | caacaacaca gtttatgatc ctttgcaacc tgaattagac tcattcaagg aggagttaga |
| 25021 | taaatatttt aagaatcata catcaccaga tgttgattta ggtgacatct ctggcattaa |
| 25081 | tgcttcagtt gtaaacattc aaaaagaaat tgaccgcctc aatgaggttg ccaagaattt |
| 25141 | aaatgaatct ctcatcgatc tccaagaact tggaaagtat gagcagtata taaaatggcc |
| 25201 | atggtacatt tggctaggtt ttatagctgg cttgattgcc atagtaatgg tgacaattat |
| 25261 | gctttgctgt atgaccagtt gctgtagttg tctcaagggc tgttgttctt gtggatcctg |
| 25321 | ctgcaaattt gatgaagacg actctgagcc agtgctcaaa ggagtcaaat tacattacac |
| 25381 | ataaacgaac ttatggattt gtttatgaga atcttcacaa ttggaactgt aactttgaag |
| 25441 | caaggtgaaa tcaaggatgc tactccttca gattttgttc gcgctactgc aacgataccg |
| 25501 | atacaagcct cactcccttt cggatggctt attgttggcg ttgcacttct tgctgttttt |
| 25561 | cagagcgctt ccaaaatcat aaccctcaaa aagagatggc aactagcact ctccaagggt |
| 25621 | gttcactttg tttgcaactt gctgttgttg tttgtaacag tttactcaca ccttttgctc |
| 25681 | gttgctgctg gccttgaagc cccttttctc tatctttatg ctttagtcta cttcttgcag |
| 25741 | agtataaact ttgtaagaat aataatgagg ctttggcttt gctggaaatg ccgttccaaa |
| 25801 | aacccattac tttatgatgc caactatttt ctttgctggc atactaattg ttacgactat |
| 25861 | tgtatacctt acaatagtgt aacttcttca attgtcatta cttcaggtga tggcacaaca |
| 25921 | agtcctattt ctgaacatga ctaccagatt ggtggttata ctgaaaaatg ggaatctgga |
| 25981 | gtaaaagact gtgttgtatt acacagttac ttcacttcag actattacca gctgtactca |
| 26041 | actcaattga gtacagacac tggtgttgaa catgttacct tcttcatcta caataaaatt |
| 26101 | gttgatgagc ctgaagaaca tgtccaaatt cacacaatcg acggttcatc cggagttgtt |
| 26161 | aatccagtaa tggaaccaat ttatgatgaa ccgacgacga ctactagcgt gcctttgtaa |
| 26221 | gcacaagctg atgagtacga acttatgtac tcattcgttt cggaagagac aggtacgtta |
| 26281 | atagttaata gcgtacttct ttttcttgct ttcgtggtat tcttgctagt tacactagcc |
| 26341 | atccttactg cgcttcgatt gtgtgcgtac tgctgcaata ttgttaacgt gagtcttgta |
| 26401 | aaaccttctt tttacgttta ctctcgtgtt aaaaatctga attcttctag agttcctgat |
| 26461 | cttctggtct aaacgaacta aatattatat tagtttttct gtttggaact ttaattttag |
| 26521 | ccatggcaga ttccaacggt actattaccg ttgaagagct taaaaagctc cttgaacaat |
| 26581 | ggaacctagt aataggtttc ctattcctta catggatttg tcttctacaa tttgcctatg |
| 26641 | ccaacaggaa taggtttttg tatataatta agttaatttt cctctggctg ttatggccag |
| 26701 | taactttagc ttgttttgtg cttgctgctg tttacagaat aaattggatc accggtggaa |
| 26761 | ttgctatcgc aatggcttgt cttgtaggct tgatgtggct cagctacttc attgcttctt |
| 26821 | tcagactgtt tgcgcgtacg cgttccatgt ggtcattcaa tccagaaact aacattcttc |
| 26881 | tcaacgtgcc actccatggc actattctga ccagaccgct tctagaaagt gaactcgtaa |
| 26941 | tcggagctgt gatccttcgt ggacatcttc gtattgctgg acaccatcta ggacgctgtg |
| 27001 | acatcaagga cctgcctaaa gaaatcactg ttgctacatc acgaacgctt tcttattaca |
| 27061 | aattgggagc ttcgcagcgt gtagcaggtg actcaggttt tgctgcatac agtcgctaca |
| 27121 | ggattggcaa ctataaatta aacacagacc attccagtag cagtgacaat attgctttgc |
| 27181 | ttgtacagta agtgacaaca gatgtttcat ctcgttgact ttcaggttac tatagcagag |
| 27241 | atattactaa ttattatgag gacttttaaa gtttccattt ggaatcttga ttacatcata |
| 27301 | aacctcataa ttaaaaattt atctaagtca ctaactgaga ataaatattc tcaattagat |
| 27361 | gaagagcaac caatggagat tgattaaacg aacatgaaaa ttattctttt cttggcactg |
| 27421 | ataacactcg ctacttgtga gctttatcac taccaagagt gtgttagagg tacaacagta |
| 27481 | cttttaaaag aaccttgctc ttctggaaca tacgagggca attcaccatt tcatcctcta |
| 27541 | gctgataaca aatttgcact gacttgcttt agcactcaat ttgcttttgc ttgtcctgac |
| 27601 | ggcgtaaaac acgtctatca gttacgtgcc agatcagttt cacctaaact gttcatcaga |
| 27661 | caagaggaag ttcaagaact ttactctcca atttttctta ttgttgcggc aatagtgttt |
| 27721 | ataacacttt gcttcacact caaaagaaag acagaatgat tgaactttca ttaattgact |
| 27781 | tctatttgtg ctttttagcc tttctgctat tccttgtttt aattatgctt attatctttt |
| 27841 | ggttctcact tgaactgcaa gatcataatg aaacttgtca cgcctaaacg aacatgaaat |
| 27901 | ttcttgtttt cttaggaatc atcacaactg tagctgcatt tcaccaagaa tgtagtttac |
| 27961 | agtcatgtac tcaacatcaa ccatatgtag ttgatgaccc gtgtcctatt cacttctatt |
| 28021 | ctaaatggta tattagagta ggagctagaa aatcagcacc tttaattgaa ttgtgcgtgg |
| 28081 | atgaggctgg ttctaaatca cccattcagt acatcgatat cggtaattat acagtttcct |
| 28141 | gtttaccttt tacaattaat tgccaggaac ctaaattggg tagtcttgta gtgcgttgtt |
| 28201 | cgttctatga agacttttta gagtatcatg acgttcgtgt tgttttagat ttcatctaaa |
| 28261 | cgaacaaact aaaatgtctg ataatggacc ccaaaatcag cgaaatgcac cccgcattac |
| 28321 | gtttggtgga ccctcagatt caactggcag taaccagaat ggagaacgca gtggggcgcg |
| 28381 | atcaaaacaa cgtcggcccc aaggtttacc caataatact gcgtcttggt tcaccgctct |
| 28441 | cactcaacat ggcaaggaag accttaaatt ccctcgagga caaggcgttc caattaacac |
| 28501 | caatagcagt ccagatgacc aaattggcta ctaccgaaga gctaccagac gaattcgtgg |
| 28561 | tggtgacggt aaaatgaaag atctcagtcc aagatggtat ttctactacc taggaactgg |
| 28621 | gccagaagct ggacttccct atggtgctaa caaagacggc atcatatggg ttgcaactga |
| 28681 | gggagccttg aatacaccaa aagatcacat tggcacccgc aatcctgcta acaatgctgc |
| 28741 | aatcgtgcta caacttcctc aaggaacaac attgccaaaa ggcttctacg cagaagggag |
| 28801 | cagaggcggc agtcaagcct cttctcgttc ctcatcacgt agtcgcaaca gttcaagaaa |
| 28861 | ttcaactcca ggcagcagta ggggaacttc tcctgctaga atggctggca atggcggtga |
| 28921 | tgctgctctt gctttgctgc tgcttgacag attgaaccag cttgagagca aaatgtctgg |
| 28981 | taaaggccaa caacaacaag gccaaactgt cactaagaaa tctgctgctg aggcttctaa |
| 29041 | gaagcctcgg caaaaacgta ctgccactaa agcatacaat gtaacacaag ctttcggcag |
| 29101 | acgtggtcca gaacaaaccc aaggaaattt tggggaccag gaactaatca gacaaggaac |
| 29161 | tgattacaaa cattggccgc aaattgcaca atttgccccc agcgcttcag cgttcttcgg |
| 29221 | aatgtcgcgc attggcatgg aagtcacacc ttcgggaacg tggttgacct acacaggtgc |
| 29281 | catcaaattg gatgacaaag atccaaattt caaagatcaa gtcattttgc tgaataagca |
| 29341 | tattgacgca tacaaaacat tcccaccaac agagcctaaa aaggacaaaa agaagaaggc |
| 29401 | tgatgaaact caagccttac cgcagagaca gaagaaacag caaactgtga ctcttcttcc |
| 29461 | tgctgcagat ttggatgatt tctccaaaca attgcaacaa tccatgagca gtgctgactc |
| 29521 | aactcaggcc taaactcatg cagaccacac aaggcagatg ggctatataa acgttttcgc |
| 29581 | ttttccgttt acgatatata gtctactctt gtgcagaatg aattctcgta actacatagc |
| 29641 | acaagtagat gtagttaact ttaatctcac atagcaatct ttaatcagtg tgtaacatta |
| 29701 | gggaggactt gaaagagcca ccacattttc accgaggcca cgcggagtac gatcgagtgt |
| 29761 | acagtgaaca atgctaggga gagctgccta tatggaagag ccctaatgtg taaaattaat |
| 29821 | tttagtagtg ctatccccat gtgattttaa tagcttctta ggagaatgac aaaaaaaaaa |
| 29881 | aaaaaaaaaa aaaaaaaaaa aaa |

[0130] In some embodiments, a CoV RNAi agent includes an antisense strand wherein position 19 of the antisense strand (5′→3′) is capable of forming a base pair with position 1 of a 19-mer target sequence disclosed in Table 1. In some embodiments, a CoV RNAi agent includes an antisense strand wherein position 1 of the antisense strand (5′→3′) is capable of forming a base pair with position 19 of a 19-mer target sequence disclosed in Table 1.

[0131] In some embodiments, a CoV RNAi agent includes an antisense strand wherein position 2 of the antisense strand (5′→3′) is capable of forming a base pair with position 18 of a 19-mer target sequence disclosed in Table 1. In some embodiments, a CoV RNAi agent includes an antisense strand wherein positions 2 through 18 of the antisense strand (5′→3′) are capable of forming base pairs with each of the respective complementary bases located at positions 18 through 2 of the 19-mer target sequence disclosed in Table 1.

[0132] For the RNAi agents disclosed herein, the nucleotide at position 1 of the antisense strand (from 5′ end→3′ end) can be perfectly complementary to a SARS-CoV-2 viral genome (or other coronavirus genome being targeted), or can be non-complementary to a SARS-CoV-2 viral genome (or other coronavirus genome being targeted). In some embodiments, the nucleotide at position 1 of the antisense strand (from 5′ end→3′ end) is a U, A, or dT. In some embodiments, the nucleotide at position 1 of the antisense strand (from 5′ end→3′ end) forms an A:U or U:A base pair with the sense strand.

[0133] In some embodiments, a CoV RNAi agent antisense strand comprises the sequence of nucleotides (from 5′ end→3′ end) 2-18 or 2-19 of any of the antisense strand sequences in Table 3B. In some embodiments, a CoV RNAi agent sense strand comprises the sequence of nucleotides (from 5′ end→3′ end) 1-17, 1-18, or 2-18 of any of the sense strand sequences in Table 4B, Table 5B, or Table 6B.

[0134] In some embodiments, a CoV RNAi agent is comprised of (i) an antisense strand comprising the sequence of nucleotides (from 5′ end→3′ end) 2-18 or 2-19 of any of the antisense strand sequences in Table 3B, and (ii) a sense strand comprising the sequence of nucleotides (from 5′ end→3′ end) 1-17 or 1-18 of any of the sense strand sequences in Table 4B, Table 5B, or Table 6B.

[0135] In some embodiments, the CoV RNAi agents include core 19-mer nucleotide sequences shown in the following Table 2.

TABLE 2
CoV RNAi agent Antisense Strand and Sense Strand Core Stretch Base Sequences (N = any nucleobase)

| | | | | Corresponding | |
|---|---|---|---|---|---|
| | Antisense Strand Base Sequence | | Sense Strand Base Sequence | Positions of | Targeted |
| | (5′ → 3′) | | (5′ → 3′) | Identified | Viral |
| SEQ ID | (Shown as an Unmodified | SEQ ID | (Shown as an Unmodified | Sequence on | Genome |
| NO: | Nucleotide Sequence) | NO: | Nucleotide Sequence) | SEQ ID NO: 1 | Position |
| 4 | UUAGUAGGUAUAACCACAG | 12 | CUGUGGUUAUACCUACUAA | 4158-4176 | 4156 |
| 5 | AUAGUAGGUAUAACCACAG | 13 | CUGUGGUUAUACCUACUAU | 4158-4176 | 4156 |
| 6 | NUAGUAGGUAUAACCACAG | 14 | CUGUGGUUAUACCUACUAN | 4158-4176 | 4156 |
| 7 | NUAGUAGGUAUAACCACAN | 15 | NUGUGGUUAUACCUACUAN | 4158-4176 | 4156 |
| 8 | UUUGUAAUCAGUUCCUUGU | 16 | ACAAGGAACUGAUUACAAA | 29152-29170 | 29150 |
| 9 | AUUGUAAUCAGUUCCUUGU | 17 | ACAAGGAACUGAUUACAAU | 29152-29170 | 29150 |
| 10 | NUUGUAAUCAGUUCCUUGU | 18 | ACAAGGAACUGAUUACAAN | 29152-29170 | 29150 |
| 11 | NUUGUAAUCAGUUCCUUGN | 19 | NCAAGGAACUGAUUACAAN | 29152-29170 | 29150 |

[0136] The CoV RNAi agent sense strands and antisense strands that comprise or consist of the nucleotide sequences in Table 2 can be modified nucleotides or unmodified nucleotides. In some embodiments, the CoV RNAi agents having the sense and antisense strand sequences that comprise or consist of any of the nucleotide sequences in Table 2 are all or substantially all modified nucleotides.

[0137] In some embodiments, the antisense strand of a CoV RNAi agent disclosed herein differs by 0, 1, 2, or 3 nucleotides from any of the antisense strand sequences in Table 2. In some embodiments, the sense strand of a CoV RNAi agent disclosed herein differs by 0, 1, 2, or 3 nucleotides from any of the sense strand sequences in Table 2.

[0138] As used herein, each N listed in a sequence disclosed in Table 2 may be independently selected from any and all nucleobases (including those found on both modified and unmodified nucleotides). In some embodiments, an N nucleotide listed in a sequence disclosed in Table 2 has a nucleobase that is complementary to the N nucleotide at the corresponding position on the other strand. In some embodiments, an N nucleotide listed in a sequence disclosed in Table 2 has a nucleobase that is not complementary to the N nucleotide at the corresponding position on the other strand. In some embodiments, an N nucleotide listed in a sequence disclosed in Table 2 has a nucleobase that is the same as the N nucleotide at the corresponding position on the other strand. In some embodiments, an N nucleotide listed in a sequence disclosed in Table 2 has a nucleobase that is different from the N nucleotide at the corresponding position on the other strand.

[0139] Certain modified CoV RNAi agent sense and antisense strands are provided in Table 3B, Table 4B, Table 5B, Table 6B, and Table 10B. Certain modified CoV RNAi agent antisense strands, as well as their underlying unmodified nucleobase sequences, are provided in Table 3B. Certain modified CoV RNAi agent sense strands, as well as their underlying unmodified nucleobase sequences, are provided in Tables 4B, 5B, and 6B. In forming CoV RNAi agents, each of the nucleotides in each of the underlying base sequences listed in Tables 3B, 4B, 5, B and 6B, as well as in Table 2, above, can be a modified nucleotide.

[0140] The CoV RNAi agents described herein are formed by annealing an antisense strand with a sense strand. A sense strand containing a sequence listed in Table 2, Table 4B, Table 5B, or Table 6B can be hybridized to any antisense strand containing a sequence listed in Table 2 or Table 3B, provided the two sequences have a region of at least 85% complementarity over a contiguous 16, 17, 18, 19, 20, or 21 nucleotide sequence.

[0141] In some embodiments, a CoV RNAi agent antisense strand comprises a nucleotide sequence of any of the sequences in Table 2 or Table 3B.

[0142] In some embodiments, a CoV RNAi agent comprises or consists of a duplex having the nucleobase sequences of the sense strand and the antisense strand of any of the sequences in Table 2, Table 3B, Table 4B, Table 5B, Table 6B, or Table 10B.

[0143] Examples of antisense strands containing modified nucleotides are provided in Table 3B. Examples of sense strands containing modified nucleotides are provided in Tables 4B, 5B, and 6B.

[0144] As used in Tables 3, 4, 5, 6, and 10, the following notations are used to indicate modified nucleotides, targeting groups, and linking groups:

| | |
|---|---|
| A= | adenosine-3′-phosphate |
| C= | cytidine-3′-phosphate |
| G= | guanosine-3′-phosphate |
| U= | uridine-3′-phosphate |
| I= | inosine-3′-phosphate |
| a= | 2′-O-methyladenosine-3′-phosphate |
| as= | 2′-O-methyladenosine-3′-phosphorothioate |
| c= | 2′-O-methylcytidine-3′-phosphate |
| cs= | 2′-O-methylcytidine-3′-phosphorothioate |
| g= | 2′-O-methylguanosine-3′-phosphate |
| gs= | 2′-O-methylguanosine-3′-phosphorothioate |
| i= | 2′-O-methylinosine-3′-phosphate |
| is= | 2′-O-methylinosine-3′-phosphorothioate |
| t= | 2′-O-methyl-5-methyluridine-3′-phosphate |
| ts= | 2′-O-methyl-5-methyluridine-3′-phosphorothioate |
| u= | 2′-O-methyluridine-3′-phosphate |
| us= | 2′-O-methyluridine-3′-phosphorothioate |
| Af= | 2′-fluoroadenosine-3′-phosphate |
| Afs= | 2′-fluoroadenosine-3′-phosporothioate |
| Cf= | 2′-fluorocytidine-3′-phosphate |
| Cfs= | 2′-fluorocytidine-3′-phosphorothioate |
| Gf= | 2′-fluoroguanosine-3′-phosphate |
| Gfs= | 2′-fluoroguanosine-3′-phosphorothioate |
| Tf= | 2′-fluoro-5′-methyluridine-3′-phosphate |
| Tfs= | 2′-fluoro-5′-methyluridine-3′-phosphorothioate |
| Uf= | 2′-fluorouridine-3′-phosphate |
| Ufs= | 2′-fluorouridine-3′-phosphorothioate |
| dT= | 2′-deoxythymidine-3′-phosphate |
| A_{UNA}= | 2′,3′-seco-adenosine-3′-phosphate |
| A_{UNA}s= | 2′,3′-seco-adenosine-3′-phosphorothioate |
| C_{UNA}= | 2′,3′-seco-cytidine-3′-phosphate |
| C_{UNA}s= | 2′,3′-seco-cytidine-3′-phosphorothioate |
| G_{UNA}= | 2′,3′-seco-guanosine-3′-phosphate |
| G_{UNA}s= | 2′,3′-seco-guanosine-3′-phosphorothioate |
| U_{UNA}= | 2′,3′-seco-uridine-3′-phosphate |
| U_{UNA}s= | 2′,3′-seco-uridine-3′-phosphorothioate |
| a_2N= | see Table 11 |
| a_2Ns= | see Table 11 |
| (invAb)= | inverted abasic deoxyribonucleotide-5′- |
| | phosphate, see Table 11 |
| (invAb)s= | inverted abasic deoxyribonucleotide-5′- |
| | phosphorothioate, see Table 11 |
| s= | phosphorothioate linkage |
| p= | terminal phosphate (as synthesized) |
| vpdN= | vinyl phosphonate deoxyribonucleotide |
| cPrpa= | 5′-cyclopropyl phosphonate-2′-O-methyladenosine-3′- |
| | phosphate (see Table 11) |
| cPrpas= | 5′-cyclopropyl phosphonate-2′-O-methyladenosine-3′- |
| | phosphorothioate (see Table 11) |
| cPrpu= | 5′-cyclopropyl phosphonate-2′-O-methyluridine-3′- |
| | phosphate (see Table 11) |
| cPrpus= | 5′-cyclopropyl phosphonate-2′-O-methyluridine-3′- |
| | phosphorothioate (see Table 11) |
| (Alk-SS-C6)= | see Table 11 |
| (C6-SS-Alk)= | see Table 11 |
| (C6-SS-C6)= | see Table 11 |
| (6-SS-6)= | see Table 11 |
| (C6-SS-Alk-Me)= | see Table 11 |
| (NH2-C6)= | see Table 11 |
| (TriAlk14)= | see Table 11 |
| (TriAlk14)s= | see Table 11 |
| -C6-= | see Table 11 |
| -C6s-= | see Table 11 |
| -L6-C6-= | see Table 11 |
| -L6-C6s-= | see Table 11 |
| -Alk-cyHex-= | see Table 11 |
| -Alk-cyHexs-= | see Table 11 |
| (TA14)= | see Table 11 (structure of (TriAlk14)s after |
| | conjugation) |
| (TA14)s= | see Table 11 (structure of (TriAlk14)s after |
| | conjugation) |

[0145] As the person of ordinary skill in the art would readily understand, unless otherwise indicated by the sequence (such as, for example, by a phosphorothioate linkage “s”), when present in an oligonucleotide, the nucleotide monomers are mutually linked by 5′-3′-phosphodiester bonds. As the person of ordinary skill in the art would clearly understand, the inclusion of a phosphorothioate linkage as shown in the modified nucleotide sequences disclosed herein replaces the phosphodiester linkage typically present in oligonucleotides. Further, the person of ordinary skill in the art would readily understand that the terminal nucleotide at the 3′ end of a given oligonucleotide sequence would typically have a hydroxyl (—OH) group at the respective 3′ position of the given monomer instead of a phosphate moiety ex vivo. Additionally, for the embodiments disclosed herein, when viewing the respective strand 5′→3′, the inverted abasic residues are inserted such that the 3′ position of the deoxyribose is linked at the 3′ end of the preceding monomer on the respective strand (see, e.g., Table 11). Moreover, as the person of ordinary skill would readily understand and appreciate, while the phosphorothioate chemical structures depicted herein typically show the anion on the sulfur atom, the inventions disclosed herein encompass all phosphorothioate tautomers (e.g., where the sulfur atom has a double-bond and the anion is on an oxygen atom). Unless expressly indicated otherwise herein, such understandings of the person of ordinary skill in the art are used when describing the CoV RNAi agents and compositions of CoV RNAi agents disclosed herein.

[0146] Certain examples of targeting groups and linking groups used with the CoV RNAi agents disclosed herein are included in the chemical structures provided below in Table 11. Each sense strand and/or antisense strand can have any targeting groups or linking groups listed herein, as well as other targeting or linking groups, conjugated to the 5′ and/or 3′ end of the sequence.

TABLE 3A
CoV RNAi agent Antisense Strand Sequences

| | | | Underlying Base Sequence (5′ → 3′) | |
|---|---|---|---|---|
| | | SEQ ID | (Shown as an Unmodified | SEQ ID |
| AS Strand ID | Modified Antisense Strand (5′ → 3′) | NO. | Nucleotide Sequence) | NO. |
| AM11997-AS | asAfsasCfuGfaGfuUfgGfaCfgUfgUfgUfsc | 20 | AAACUGAGUUGGACGUGUGUC | 444 |
| AM11999-AS | usGfsasUfuUfuCfcAfcUfaCfuUfcUfuCfsc | 21 | UGAUUUUCCACUACUUCUUCC | 445 |
| AM12001-AS | usUfsasGfgAfuUfuUfcCfaCfuAfcUfuCfsc | 22 | UUAGGAUUUUCCACUACUUCC | 446 |
| AM12003-AS | asAfsasCfcAfaCfaCfuAfcCfaCfaUfgAfsc | 23 | AAACCAACACUACCACAUGAC | 447 |
| AM12005-AS | asUfsasCfaUfuUfgGfgUfcAfuAfgCfuUfsg | 24 | AUACAUUUGGGUCAUAGCUUG | 448 |
| AM12007-AS | usGfsasUfaUfaUfgUfgGfuAfcCfaUfgUfsc | 25 | UGAUAUAUGUGGUACCAUGUC | 449 |
| AM12009-AS | usUfsgsAfuAfuAfuGfuGfgUfaCfcAfuGfsc | 26 | UUGAUAUAUGUGGUACCAUGC | 450 |
| AM12011-AS | usUfsusAfcAfuCfcUfgAfuUfaUfgUfaCfsc | 27 | UUUACAUCCUGAUUAUGUACC | 451 |
| AM12013-AS | asAfsgsUfuUfaCfaUfcCfuGfaUfuAfuGfsc | 28 | AAGUUUACAUCCUGAUUAUGC | 452 |
| AM12015-AS | usAfsasGfuUfuAfcAfuCfcUfgAfuUfaUfsg | 29 | UAAGUUUACAUCCUGAUUAUG | 453 |
| AM12017-AS | usAfsgsCfuAfuGfuAfaGfuUfuAfcAfuCfsc | 30 | UAGCUAUGUAAGUUUACAUCC | 454 |
| AM12019-AS | asUfsasAfuAfaAfgUfcUfaGfcCfuUfaCfsc | 31 | AUAAUAAAGUCUAGCCUUACC | 455 |
| AM12021-AS | usUfsasCfuAfcAfgAfuAfgAfgAfcAfcCfsa | 32 | UUACUACAGAUAGAGACACCA | 456 |
| AM12023-AS | usAfsusAfgUfaCfuAfcAfgAfuAfgAfgAfsc | 33 | UAUAGUACUACAGAUAGAGAC | 457 |
| AM12025-AS | usCfsasUfaGfuAfcUfaCfaGfaUfaGfaGfsc | 34 | UCAUAGUACUACAGAUAGAGC | 458 |
| AM12027-AS | usGfsusCfaUfaGfuAfcUfaCfaGfaUfaGfsc | 35 | UGUCAUAGUACUACAGAUAGC | 459 |
| AM12029-AS | usAfsasUfuUfgCfaAfcAfuUfgCfuAfgAfsc | 36 | UAAUUUGCAACAUUGCUAGAC | 460 |
| AM12031-AS | usCfsasUfcAfuAfgAfgAfuGfaGfuCfuUfsc | 37 | UCAUCAUAGAGAUGAGUCUUC | 461 |
| AM12033-AS | usUfscsCfaAfuUfaAfuGfuGfaCfuCfcAfsc | 38 | UUCCAAUUAAUGUGACUCCAC | 462 |
| AM12035-AS | usAfscsAfuAfaGfuUfcGfuAfcUfcAfuCfsc | 39 | UACAUAAGUUCGUACUCAUCC | 463 |
| AM12037-AS | usGfsasAfuGfaGfuAfcAfuAfaGfuUfcGfsu | 40 | UGAAUGAGUACAUAAGUUCGU | 464 |
| AM12039-AS | asCfsgsAfaUfgAfgUfaCfaUfaAfgUfuCfsg | 41 | ACGAAUGAGUACAUAAGUUCG | 465 |
| AM12041-AS | usGfsasAfaCfgAfaUfgAfgUfaCfaUfaAfsg | 42 | UGAAACGAAUGAGUACAUAAG | 466 |
| AM12044-AS | asAfsgsAfaGfuAfcGfcUfaUfuAfaCfuAfsc | 43 | AAGAAGUACGCUAUUAACUAC | 467 |
| AM12046-AS | asAfsgsAfaUfaCfcAfcGfaAfaGfcAfaGfsc | 44 | AAGAAUACCACGAAAGCAAGC | 468 |
| AM12048-AS | usAfsgsUfaAfgGfaUfgGfcUfaGfuGfuAfsc | 45 | UAGUAAGGAUGGCUAGUGUAC | 469 |
| AM12050-AS | usUfsasAfcAfaUfaUfuGfcAfgCfaGfuAfsc | 46 | UUAACAAUAUUGCAGCAGUAC | 470 |
| AM12052-AS | asCfsgsUfuAfaCfaAfuAfuUfgCfaGfcAfsg | 47 | ACGUUAACAAUAUUGCAGCAG | 471 |
| AM12054-AS | usAfscsGfuUfaAfcAfaUfaUfuGfcAfgCfsa | 48 | UACGUUAACAAUAUUGCAGCA | 472 |
| AM12057-AS | usGfsusUfuAfgAfcCfaGfaAfgAfuCfaGfsg | 49 | UGUUUAGACCAGAAGAUCAGG | 473 |
| AM12059-AS | asAfsusAfaGfaAfaGfcGfuUfcGfuGfaUfsg | 50 | AAUAAGAAAGCGUUCGUGAUG | 474 |
| AM12062-AS | usUfsusGfuAfaUfaAfgAfaAfgCfgUfuCfsg | 51 | UUUGUAAUAAGAAAGCGUUCG | 475 |
| AM12064-AS | usAfsusCfuGfuUfgUfcAfcUfuAfcUfgUfsc | 52 | UAUCUGUUGUCACUUACUGUC | 476 |
| AM12066-AS | asAfscsAfuCfuGfuUfgUfcAfcUfuAfcUfsg | 53 | AACAUCUGUUGUCACUUACUG | 477 |
| AM12068-AS | usGfsasUfcUfuUfgUfcAfuCfcAfaUfuUfsg | 54 | UGAUCUUUGUCAUCCAAUUUG | 478 |
| AM12070-AS | usAfsusUfaAfaGfaUfuGfcUfaUfgUfgAfsg | 55 | UAUUAAAGAUUGCUAUGUGAG | 479 |
| AM12469-AS | usUfsgsUfcUfaAfcAfaCfaUfcAfaAfaGfsg | 56 | UUGUCUAACAACAUCAAAAGG | 480 |
| AM12471-AS | usCfsusUfgAfuCfuAfaAfgCfaUfuAfcCfsa | 57 | UCUUGAUCUAAAGCAUUACCA | 481 |
| AM12473-AS | usGfsusUfuAfaCfuAfgCfaUfuGfuAfuGfsc | 58 | UGUUUAACUAGCAUUGUAUGC | 482 |
| AM12475-AS | usUfsgsUfuUfaAfcUfaGfcAfuUfgUfaUfsg | 59 | UUGUUUAACUAGCAUUGUAUG | 483 |
| AM12477-AS | usCfsusCfuAfuCfaGfaCfaUfuAfuGfcAfsc | 60 | UCUCUAUCAGACAUUAUGCAC | 484 |
| AM12479-AS | usCfsasUfuAfaGfaUfcUfgAfaUfcGfaCfsc | 61 | UCAUUAAGAUCUGAAUCGACC | 485 |
| AM12481-AS | usCfscsAfaUfuUfgGfuCfaUfcUfgGfaCfsc | 62 | UCCAAUUUGGUCAUCUGGACC | 486 |
| AM12483-AS | usCfsasAfaUfuGfuGfcAfaUfuUfgCfgGfsc | 63 | UCAAAUUGUGCAAUUUGCGGC | 487 |
| AM12485-AS | usGfsasAfuGfuUfuUfgUfaUfgCfgUfcAfsc | 64 | UGAAUGUUUUGUAUGCGUCAC | 488 |
| AM12563-AS | usGfsgsAfaUfuUfaAfgGfuCfuUfcCfuUfsg | 65 | UGGAAUUUAAGGUCUUCCUUG | 489 |
| AM12565-AS | usGfscsUfaUfuGfgUfgUfuAfaUfuGfgAfsc | 66 | UGCUAUUGGUGUUAAUUGGAC | 490 |
| AM12567-AS | asGfsusAfgAfaAfuAfcCfaUfcUfuGfgAfsc | 67 | AGUAGAAAUACCAUCUUGGAC | 491 |
| AM12569-AS | usGfsusAfgUfaGfaAfaUfaCfcAfuCfuUfsg | 68 | UGUAGUAGAAAUACCAUCUUG | 492 |
| AM12571-AS | usUfsgsAfuCfuUfuUfgGfuGfuAfuUfcAfsc | 69 | UUGAUCUUUUGGUGUAUUCAC | 493 |
| AM12573-AS | usAfsgsCfaGfaUfuUfcUfuAfgUfgAfcAfsg | 70 | UAGCAGAUUUCUUAGUGACAG | 494 |
| AM12575-AS | usUfsasCfaUfuGfuAfuGfcUfuUfaGfuGfsg | 71 | UUACAUUGUAUGCUUUAGUGG | 495 |
| AM12577-AS | usGfsusAfaUfcAfgUfuCfcUfuGfuCfuGfsc | 72 | UGUAAUCAGUUCCUUGUCUGC | 496 |
| AM12579-AS | usUfsusGfuAfaUfcAfgUfuCfcUfuGfuCfsc | 73 | UUUGUAAUCAGUUCCUUGUCC | 497 |
| AM12581-AS | usCfsasAfuGfuUfuGfuAfaUfcAfgUfuCfsc | 74 | UCAAUGUUUGUAAUCAGUUCC | 498 |
| AM12583-AS | usCfsgsUfcAfaUfaUfgCfuUfaUfuCfaGfsc | 75 | UCGUCAAUAUGCUUAUUCAGC | 499 |
| AM13120-AS | usCfsasUfaAfgCfaCfuCfuUfaAfgAfaGfsc | 76 | UCAUAAGCACUCUUAAGAAGC | 500 |
| AM13122-AS | usUfsasGfaUfaAfgAfcAfuUfgUfcUfaAfsg | 77 | UUAGAUAAGACAUUGUCUAAG | 501 |
| AM13124-AS | usAfsusGfaAfgAfuUfgCfcAfuUfaAfuGfsc | 78 | UAUGAAGAUUGCCAUUAAUGC | 502 |
| AM13126-AS | asAfsasCfgUfaUfuAfaCfgUfaAfgCfaUfsc | 79 | AAACGUAUUAACGUAAGCAUC | 503 |
| AM13128-AS | usCfsusUfaAfgAfuUfgUfcAfaAfgGfuGfsc | 80 | UCUUAAGAUUGUCAAAGGUGC | 504 |
| AM13160-AS | usUfsgsAfuUfaUfcUfaAfuGfuCfaGfuAfsc | 81 | UUGAUUAUCUAAUGUCAGUAC | 505 |
| AM13543-AS | usUfsasguagguauAfaCfcAfcagcsa | 82 | UUAGUAGGUAUAACCACAGCA | 506 |
| AM13545-AS | asAfsasGfaagugucUfuAfaGfauugsc | 83 | AAAGAAGUGUCUUAAGAUUGC | 507 |
| AM13547-AS | usCfsgsucaaUfAfugCfuUfaUfucagsc | 84 | UCGUCAAUAUGCUUAUUCAGC | 499 |
| AM14662-AS | usUfscsAfuAfaGfcAfcUfcUfuAfaGfaAfsg | 85 | UUCAUAAGCACUCUUAAGAAG | 508 |
| AM14666-AS | cPrpusCfsusUfaAfgAfuUfgUfcAfaAfgGfuGfsc | 86 | UCUUAAGAUUGUCAAAGGUGC | 504 |
| AM14667-AS | cPrpusUfsasGfgAfuUfuUfcCfaCfuAfcUfuCfsc | 87 | UUAGGAUUUUCCACUACUUCC | 446 |
| AM14686-AS | cPrpusUfsasGfaUfaAfgAfcAfuUfgUfcUfaAfsg | 88 | UUAGAUAAGACAUUGUCUAAG | 501 |
| AM14687-AS | cPrpusGfsusAfgUfaGfaAfaUfaCfcAfuCfuUfsg | 89 | UGUAGUAGAAAUACCAUCUUG | 492 |
| AM14688-AS | cPrpusUfsusGfuAfaUfcAfgUfuCfcUfuGfuCfsc | 90 | UUUGUAAUCAGUUCCUUGUCC | 497 |
| AM14689-AS | cPrpusUfsasCfaUfuGfuAfuGfcUfuUfaGfuGfsg | 91 | UUACAUUGUAUGCUUUAGUGG | 495 |
| AM14690-AS | cPrpusUfsgsUfuUfaAfcUfaGfcAfuUfgUfaUfsg | 92 | UUGUUUAACUAGCAUUGUAUG | 483 |
| AM14859-AS | cPrpasGfsusAfgAfaAfuAfcCfaUfcUfuGfgAfsc | 93 | AGUAGAAAUACCAUCUUGGAC | 491 |
| AM14861-AS | cPrpusGfsusAfgAfaAfuAfcCfaUfcUfuGfgAfsc | 94 | UGUAGAAAUACCAUCUUGGAC | 509 |
| AM15563-AS | cPrpusUfsaGfgauuuucCfaCfuAfcuuscsc | 95 | UUAGGAUUUUCCACUACUUCC | 446 |
| AM15565-AS | cPrpusUfsaggaUfuuucCfaCfuAfcuuscsc | 96 | UUAGGAUUUUCCACUACUUCC | 446 |
| AM15566-AS | cPrpusUfsaggauuUfucCfaCfuAfcuuscsc | 97 | UUAGGAUUUUCCACUACUUCC | 446 |
| AM15568-AS | cPrpusUfsaggauuUfucCfaCfuAfcuuscsg | 98 | UUAGGAUUUUCCACUACUUCG | 510 |
| AM15569-AS | cPrpuUfaggauuUfucCfaCfuAfcuuscsc | 99 | UUAGGAUUUUCCACUACUUCC | 446 |
| AM15570-AS | cPrpusUfsgUfuuaacuaGfcAfuUfguasusg | 100 | UUGUUUAACUAGCAUUGUAUG | 483 |
| AM15572-AS | cPrpuUfgUfuuaacuaGfcAfuUfguasusg | 101 | UUGUUUAACUAGCAUUGUAUG | 483 |
| AM15574-AS | cPrpusUfsgUfuuaacuaGfcAfuUfguascsg | 102 | UUGUUUAACUAGCAUUGUACG | 511 |
| AM15575-AS | cPrpusUfsguuuAfacuaGfcAfuUfguasusg | 103 | UUGUUUAACUAGCAUUGUAUG | 483 |
| AM15576-AS | cPrpasGfsuAfgaaauacCfaUfcUfuggsasc | 104 | AGUAGAAAUACCAUCUUGGAC | 491 |
| AM15578-AS | cPrpasGfsuagaAfauacCfaUfcUfuggsasc | 105 | AGUAGAAAUACCAUCUUGGAC | 491 |
| AM15579-AS | cPrpasGfsuagaaaUfacCfaUfcUfuggsasc | 106 | AGUAGAAAUACCAUCUUGGAC | 491 |
| AM15580-AS | cPrpaGfuagaaaUfacCfaUfcUfuggsasc | 107 | AGUAGAAAUACCAUCUUGGAC | 491 |
| AM15582-AS | cPrpusGfsuagaaaUfacCfaUfcUfuggsasc | 108 | UGUAGAAAUACCAUCUUGGAC | 509 |
| AM15795-AS | cPrpusUfsusGfuaaucagUfuCfcUfugucsc | 109 | UUUGUAAUCAGUUCCUUGUCC | 497 |
| AM15797-AS | cPrpusUfsusGfuaaUfCfagUfuCfcUfugucsc | 110 | UUUGUAAUCAGUUCCUUGUCC | 497 |
| AM15798-AS | cPrpusUfsuGfuaaucagUfuCfcUfuguscsc | 111 | UUUGUAAUCAGUUCCUUGUCC | 497 |
| AM15799-AS | cPrpuUfuGfuaaucagUfuCfcUfuguscsc | 112 | UUUGUAAUCAGUUCCUUGUCC | 497 |
| AM15801-AS | cPrpusUfsusGfuaaucagUfuCfcUfugucsg | 113 | UUUGUAAUCAGUUCCUUGUCG | 512 |
| AM15803-AS | cPrpusAfsasGfuUfuAfcAfuCfcUfgAfuUfaUfsg | 114 | UAAGUUUACAUCCUGAUUAUG | 453 |
| AM15804-AS | cPrpusAfsasGfuuuacauCfcUfgAfuuausg | 115 | UAAGUUUACAUCCUGAUUAUG | 453 |
| AM15807-AS | cPrpusAfsasGfuuuacauCfcUfgAfuuacsg | 116 | UAAGUUUACAUCCUGAUUACG | 513 |
| AM15808-AS | cPrpusAfsasGfuuuAfCfauCfcUfgAfuuausg | 117 | UAAGUUUACAUCCUGAUUAUG | 453 |
| AM15810-AS | cPrpusAfsgsCfuAfuGfuAfaGfuUfuAfcAfuCfsc | 118 | UAGCUAUGUAAGUUUACAUCC | 454 |
| AM15812-AS | cPrpusAfsgcuaugUfaaGfuUfuAfcauscsc | 119 | UAGCUAUGUAAGUUUACAUCC | 454 |
| AM15813-AS | cPrpusCfsusUfaagauugUfcAfaAfggugsc | 120 | UCUUAAGAUUGUCAAAGGUGC | 504 |
| AM15815-AS | cPrpusCfsusUfaagAfUfugUfcAfaAfggugsc | 121 | UCUUAAGAUUGUCAAAGGUGC | 504 |
| AM15816-AS | cPrpusCfsusuaaGfauugUfcAfaAfggugsc | 122 | UCUUAAGAUUGUCAAAGGUGC | 504 |
| AM15818-AS | cPrpusUfsasGfuAfgGfuAfuAfaCfcAfcAfgCfsa | 123 | UUAGUAGGUAUAACCACAGCA | 506 |
| AM15820-AS | cPrpasAfsgsAfaGfuGfuCfuUfaAfgAfuUfgUfsc | 124 | AAGAAGUGUCUUAAGAUUGUC | 514 |
| AM15822-AS | cPrpusCfsasUfaAfgAfaAfgUfgUfgCfcCfaUfsg | 125 | UCAUAAGAAAGUGUGCCCAUG | 515 |
| AM15824-AS | cPrpusAfsasCfuUfaGfgGfuCfaAfuUfuCfuGfsu | 126 | UAACUUAGGGUCAAUUUCUGU | 516 |
| AM15826-AS | cPrpasAfsasCfgUfaUfuAfaCfgUfaAfgCfaUfsc | 127 | AAACGUAUUAACGUAAGCAUC | 503 |
| AM15828-AS | cPrpasUfsasCfaUfuUfgGfgUfcAfuAfgCfuUfsg | 128 | AUACAUUUGGGUCAUAGCUUG | 448 |
| AM15830-AS | cPrpusCfsasUfuAfaGfaUfcUfgAfaUfcGfaCfsa | 129 | UCAUUAAGAUCUGAAUCGACA | 517 |
| AM15832-AS | cPrpasAfsgsAfaUfaCfcAfcGfaAfaGfcAfaGfsc | 130 | AAGAAUACCACGAAAGCAAGC | 468 |
| AM16516-AS | cPrpuUfaGfgauuuucCfaCfuAfcuuscsc | 131 | UUAGGAUUUUCCACUACUUCC | 446 |
| AM16517-AS | cPrpuUfaGfgauuuucCfaCfuAfcuuscsg | 132 | UUAGGAUUUUCCACUACUUCG | 510 |
| AM16519-AS | cPrpusUfsuGfuaaucagUfuCfcUfuguscsu | 133 | UUUGUAAUCAGUUCCUUGUCU | 518 |
| AM16521-AS | cPrpusAfsaGfuuuacauCfcUfgAfuuasusg | 134 | UAAGUUUACAUCCUGAUUAUG | 453 |
| AM16522-AS | cPrpuAfaGfuuuacauCfcUfgAfuuausg | 135 | UAAGUUUACAUCCUGAUUAUG | 453 |
| AM16523-AS | cPrpuAfaGfuuuacauCfcUfgAfuuascsg | 136 | UAAGUUUACAUCCUGAUUACG | 513 |
| AM16966-AS | cPrpusUfsaGfgauuuucCfaCfuAfcuuscsg | 137 | UUAGGAUUUUCCACUACUUCG | 510 |

TABLE 3B
Further CoV RNAi agent Antisense Strand Sequences

| | | | Underlying Base | |
|---|---|---|---|---|
| | | | Sequence (5′ → 3′) | |
| | | SEQ | (Shown as an | SEQ |
| AS Strand | Modified Antisense Strand | ID | Unmodified Nucleotide | ID |
| ID | (5′ → 3′) | NO. | Sequence) | NO. |
| AM18934-AS | usUfsasGfuAfgGfuAfuAfaCfcAfcAfgCfsa | 138 | UUAGUAGGUAUAACCACAGCA | 506 |
| AM18935-AS | usUfsAfsguagguauAfaCfcAfcagcsa | 139 | UUAGUAGGUAUAACCACAGCA | 506 |
| AM18936-AS | usUfsasguaGfguauAfaCfcAfcagcsa | 140 | UUAGUAGGUAUAACCACAGCA | 506 |
| AM18938-AS | usUfsAfsgUfaGfguauAfaCfcAfcagcsa | 141 | UUAGUAGGUAUAACCACAGCA | 506 |
| AM18939-AS | usUfsasGfuaGfgUfauAfaCfcAfcagcsa | 142 | UUAGUAGGUAUAACCACAGCA | 506 |
| AM18940-AS | usUfsasgUfaGfgUfauAfaCfcAfcagcsa | 143 | UUAGUAGGUAUAACCACAGCA | 506 |
| AM18942-AS | usUfsaGfuAfgGfuAfuAfaCfcAfcAfgCfsa | 144 | UUAGUAGGUAUAACCACAGCA | 506 |
| AM18961-AS | cPrpusUfsasGfuAfgguauAfaCfcAfcAfgcsa | 145 | UUAGUAGGUAUAACCACAGCA | 506 |
| AM18962-AS | cPrpusUfsasguaGfguauAfaCfcAfcagcsa | 146 | UUAGUAGGUAUAACCACAGCA | 506 |
| AM18963-AS | usUfsasGfuAfgguauAfaCfcAfcAfgcsa | 147 | UUAGUAGGUAUAACCACAGCA | 506 |
| AM19027-AS | usUfsasguAfgguauAfaCfcAfcagcsa | 148 | UUAGUAGGUAUAACCACAGCA | 506 |
| AM19028-AS | cPrpusUfsasguAfgguauAfaCfcAfcagcsa | 149 | UUAGUAGGUAUAACCACAGCA | 506 |
| AM19029-AS | cPrpusUfsusGfuAfaucagUfuCfcUfuGfucsc | 150 | UUUGUAAUCAGUUCCUUGUCC | 497 |
| AM19030-AS | cPrpusUfuGfuAfaucagUfuCfcUfuGfucsc | 151 | UUUGUAAUCAGUUCCUUGUCC | 497 |
| AM19031-AS | cPrpusUfsusguAfaucagUfuCfcUfugucsc | 152 | UUUGUAAUCAGUUCCUUGUCC | 497 |
| AM19330-AS | usUfsasGfuagguauAfaCfcAfcagcsa | 153 | UUAGUAGGUAUAACCACAGCA | 506 |
| AM19331-AS | cPrpusUfsusguaAfucagUfuCfcUfugucsc | 154 | UUUGUAAUCAGUUCCUUGUCC | 497 |
| AM19333-AS | cPrpusUfsuGfuaaucagUfuCfcUfugucsg | 155 | UUUGUAAUCAGUUCCUUGUCG | 512 |
| AM19413-AS | usUfsasgUfagguauAfaCfcAfcagcsa | 156 | UUAGUAGGUAUAACCACAGCA | 506 |
| AM19415-AS | cPrpusUfsusgUfaaucagUfuCfcUfugucsc | 157 | UUUGUAAUCAGUUCCUUGUCC | 497 |
| AM19416-AS | cPrpusUfsusGfuAfauCfagUfuCfcUfugucsc | 158 | UUUGUAAUCAGUUCCUUGUCC | 497 |
| AM19417-AS | cPrpusUfsusGfuaAfuCfagUfuCfcUfugucsc | 159 | UUUGUAAUCAGUUCCUUGUCC | 497 |
| AM19803-AS | cPrpusUfsasgUfaGfgUfauAfaCfcAfcagcsa | 160 | UUAGUAGGUAUAACCACAGCA | 506 |
| AM19816-AS | cPrpusUfsusgUfaAfuCfagUfuCfcUfugucsc | 161 | UUUGUAAUCAGUUCCUUGUCC | 497 |
| AM19817-AS | cPrpusUfsuGfuAfaUfcAfgUfuCfcUfuGfuCfsc | 162 | UUUGUAAUCAGUUCCUUGUCC | 497 |
| AM20439-AS | cPrpusUfaguaGfguauAfaCfcAfcagcsa | 163 | UUAGUAGGUAUAACCACAGCA | 506 |
| AM20532-AS | cPrpusUfuGfuaAfuCfagUfuCfcUfugucsc | 164 | UUUGUAAUCAGUUCCUUGUCC | 497 |

TABLE 4A
CoV RNAi Agent Sense Strand Sequences (Shown Without Linkers,
Conjugates, or Capping Moieties.)

| | | | Underlying | |
|---|---|---|---|---|
| | | | Base Sequence | |
| | | SEQ | (5′ → 3′) (Shown | SEQ |
| | Modified Sense Strand | ID | as an Unmodified | ID |
| Strand ID | (5′ → 3′) | NO. | Nucleotide Sequence) | NO. |
| AM11996-SS-NL | gacacacgUfCfCfaacucaguuu | 165 | GACACACGUCCAACUCAGUUU | 519 |
| AM11998-SS-NL | ggaagaagUfAfGfuggaaaauca | 166 | GGAAGAAGUAGUGGAAAAUCA | 520 |
| AM12000-SS-NL | ggaaguagUfGfGfaaaauccuaa | 167 | GGAAGUAGUGGAAAAUCCUAA | 521 |
| AM12002-SS-NL | gucaugugGfUfAfguguuiguuu | 168 | GUCAUGUGGUAGUGUUIGUUU | 522 |
| AM12004-SS-NL | caagcuauGfAfCfccaaauguau | 169 | CAAGCUAUGACCCAAAUGUAU | 523 |
| AM12006-SS-NL | gacaugguAfCfCfacauauauca | 170 | GACAUGGUACCACAUAUAUCA | 524 |
| AM12008-SS-NL | gcaugguaCfCfAfcauauaucaa | 171 | GCAUGGUACCACAUAUAUCAA | 525 |
| AM12010-SS-NL | gguacauaAfUfCfaggauguaaa | 172 | GGUACAUAAUCAGGAUGUAAA | 526 |
| AM12012-SS-NL | gcauaaucAfGfGfauguaaacuu | 173 | GCAUAAUCAGGAUGUAAACUU | 527 |
| AM12014-SS-NL | ca_2NuaaucaGfGfAfuguaaacuua | 174 | C(A^{2N})UAAUCAGGAUGUAAACUUA | 595 |
| AM12016-SS-NL | ggauguaaAfCfUfuacauagcua | 175 | GGAUGUAAACUUACAUAGCUA | 529 |
| AM12018-SS-NL | gguaaggcUfAfGfacuuuauua_2Nu | 176 | GGUAAGGCUAGACUUUAUU(A^{2N})U | 596 |
| AM12020-SS-NL | uggugucuCfUfAfucuguaguaa | 177 | UGGUGUCUCUAUCUGUAGUAA | 531 |
| AM12022-SS-NL | gucucuauCfUfGfuaguacuaua | 178 | GUCUCUAUCUGUAGUACUAUA | 532 |
| AM12024-SS-NL | gcucuaucUfGfUfaguacuauga | 179 | GCUCUAUCUGUAGUACUAUGA | 533 |
| AM12026-SS-NL | gcuaucugUfAfGfuacuaugaca | 180 | GCUAUCUGUAGUACUAUGACA | 534 |
| AM12028-SS-NL | gucuagcaAfUfGfuugcaaa_2Nuua | 181 | GUCUAGCAAUGUUGCAA(A^{2N})UUA | 597 |
| AM12030-SS-NL | ga_2NagacucAfUfCfucuaugauga | 182 | G(A^{2N})AGACUCAUCUCUAUGAUGA | 598 |
| AM12032-SS-NL | guggagucAfCfAfuuaauuggaa | 183 | GUGGAGUCACAUUAAUUGGAA | 537 |
| AM12034-SS-NL | ggaugaguAfCfGfaacuuaugua | 184 | GGAUGAGUACGAACUUAUGUA | 538 |
| AM12036-SS-NL | acgaacuuAfUfGfuacucauuca | 185 | ACGAACUUAUGUACUCAUUCA | 539 |
| AM12038-SS-NL | cgaacuuaUfGfUfacucauucgu | 186 | CGAACUUAUGUACUCAUUCGU | 540 |
| AM12040-SS-NL | cuuauguaCfUfCfauucguuuca | 187 | CUUAUGUACUCAUUCGUUUCA | 541 |
| AM12042-SS-NL | cuuauguaCfUfCfauuciuuuca | 188 | CUUAUGUACUCAUUCIUUUCA | 542 |
| AM12043-SS-NL | guaguuaaUfAfGfcguacuucuu | 189 | GUAGUUAAUAGCGUACUUCUU | 543 |
| AM12045-SS-NL | gcuugcuuUfCfGfugguauucuu | 190 | GCUUGCUUUCGUGGUAUUCUU | 544 |
| AM12047-SS-NL | guacacuaGfCfCfauccuuacua | 191 | GUACACUAGCCAUCCUUACUA | 545 |
| AM12049-SS-NL | guacugcuGfCfAfauauuguuaa | 192 | GUACUGCUGCAAUAUUGUUAA | 546 |
| AM12051-SS-NL | cugcugcaAfUfAfuuguuaacgu | 193 | CUGCUGCAAUAUUGUUAACGU | 547 |
| AM12053-SS-NL | ugcugcaaUfAfUfuguuaacgua | 194 | UGCUGCAAUAUUGUUAACGUA | 548 |
| AM12055-SS-NL | ugcugcaaUfa_2NUfuguuaacgua | 195 | UGCUGCAAU(A^{2N})UUGUUAACGUA | 599 |
| AM12056-SS-NL | ccugaucuUfCfUfggucuaaaca | 196 | CCUGAUCUUCUGGUCUAAACA | 549 |
| AM12058-SS-NL | caucacgaAfCfGfcuuucuuauu | 197 | CAUCACGAACGCUUUCUUAUU | 550 |
| AM12060-SS-NL | caucacgaAfCfGfcuuucuua_2Nuu | 198 | CAUCACGAACGCUUUCUU(A^{2N})UU | 600 |
| AM12061-SS-NL | cgaacgcuUfUfCfuuauuacaaa | 199 | CGAACGCUUUCUUAUUACAAA | 551 |
| AM12063-SS-NL | gacaguaaGfUfGfacaacagaua | 200 | GACAGUAAGUGACAACAGAUA | 552 |
| AM12065-SS-NL | caguaaguGfAfCfaacagauguu | 201 | CAGUAAGUGACAACAGAUGUU | 553 |
| AM12067-SS-NL | ca_2NaauuggAfUfGfacaaagauca | 202 | C(A^{2N})AAUUGGAUGACAAAGAUCA | 601 |
| AM12069-SS-NL | cucacauaGfCfAfaucuuuaa_2Nua | 203 | CUCACAUAGCAAUCUUUA(A^{2N})UA | 602 |
| AM12468-SS-NL | ccuuuugaUfGfUfuguuagacaa | 204 | CCUUUUGAUGUUGUUAGACAA | 556 |
| AM12470-SS-NL | ugguaaugCfUfUfuagaucaaga | 205 | UGGUAAUGCUUUAGAUCAAGA | 557 |
| AM12472-SS-NL | gcauacaaUfGfCfuaguuaaaca | 206 | GCAUACAAUGCUAGUUAAACA | 558 |
| AM12474-SS-NL | ca_2NuacaauGfCfUfaguuaaacaa | 207 | C(A^{2N})UACAAUGCUAGUUAAACAA | 603 |
| AM12476-SS-NL | gugcauaaUfGfUfcugauagaga | 208 | GUGCAUAAUGUCUGAUAGAGA | 560 |
| AM12478-SS-NL | ggucgauuCfAfGfaucuuaauga | 209 | GGUCGAUUCAGAUCUUAAUGA | 561 |
| AM12480-SS-NL | gguccagaUfGfAfccaaauugga | 210 | GGUCCAGAUGACCAAAUUGGA | 562 |
| AM12482-SS-NL | gccgcaaaUfUfGfcacaauuuga | 211 | GCCGCAAAUUGCACAAUUUGA | 563 |
| AM12484-SS-NL | gugacgcaUfAfCfaaaacauuca | 212 | GUGACGCAUACAAAACAUUCA | 564 |
| AM12562-SS-NL | ca_2NaggaagAfCfCfuuaaauucca | 213 | C(A^{2N})AGGAAGACCUUAAAUUCCA | 604 |
| AM12564-SS-NL | guccaauuAfAfCfaccaauagca | 214 | GUCCAAUUAACACCAAUAGCA | 566 |
| AM12566-SS-NL | guccaagaUfGfGfuauuucuacu | 215 | GUCCAAGAUGGUAUUUCUACU | 567 |
| AM12568-SS-NL | ca_2NagauggUfAfUfuucuacuaca | 216 | C(A^{2N})AGAUGGUAUUUCUACUACA | 605 |
| AM12570-SS-NL | gugaauacAfCfCfaaaagaucaa | 217 | GUGAAUACACCAAAAGAUCAA | 569 |
| AM12572-SS-NL | cugucacuAfAfGfaaaucuicua | 218 | CUGUCACUAAGAAAUCUICUA | 570 |
| AM12574-SS-NL | ccacuaaaGfCfAfuacaauguaa | 219 | CCACUAAAGCAUACAAUGUAA | 571 |
| AM12576-SS-NL | gcagacaaGfGfAfacugauuaca | 220 | GCAGACAAGGAACUGAUUACA | 572 |
| AM12578-SS-NL | ggacaaggAfAfCfugauuacaaa | 221 | GGACAAGGAACUGAUUACAAA | 573 |
| AM12580-SS-NL | ggaacugaUfUfAfcaaacauuga | 222 | GGAACUGAUUACAAACAUUGA | 574 |
| AM12582-SS-NL | gcugaauaAfGfCfauauugacia | 223 | GCUGAAUAAGCAUAUUGACIA | 575 |
| AM13119-SS-NL | gscuucuuaAfGfAfgugcuuauga | 224 | GCUUCUUAAGAGUGCUUAUGA | 576 |
| AM13121-SS-NL | csuuagacaAfUfGfucuuaucuaa | 225 | CUUAGACAAUGUCUUAUCUAA | 577 |
| AM13123-SS-NL | gscauuaauGfGfCfaaucuucaua | 226 | GCAUUAAUGGCAAUCUUCAUA | 578 |
| AM13125-SS-NL | gsaugcuuaCfGfUfuaauacguuu | 227 | GAUGCUUACGUUAAUACGUUU | 579 |
| AM13127-SS-NL | gscaccuuuGfAfCfaaucuuaaga | 228 | GCACCUUUGACAAUCUUAAGA | 580 |
| AM13129-SS-NL | gsgaaguagUfGfGfaaaauccuaa | 229 | GGAAGUAGUGGAAAAUCCUAA | 521 |
| AM13130-SS-NL | cscuuuugaUfGfUfuguuagacaa | 230 | CCUUUUGAUGUUGUUAGACAA | 556 |
| AM13131-SS-NL | usgguaaugCfUfUfuagaucaaga | 231 | UGGUAAUGCUUUAGAUCAAGA | 557 |
| AM13132-SS-NL | csaagcuauGfAfCfccaaauguau | 232 | CAAGCUAUGACCCAAAUGUAU | 523 |
| AM13133-SS-NL | gsuccaagaUfGfGfuauuucuacu | 233 | GUCCAAGAUGGUAUUUCUACU | 567 |
| AM13134-SS-NL | csaagauggUfAfUfuucuacuaca | 234 | CAAGAUGGUAUUUCUACUACA | 568 |
| AM13135-SS-NL | cscacuaaaGfCfAfuacaauguaa | 235 | CCACUAAAGCAUACAAUGUAA | 571 |
| AM13136-SS-NL | gsgacaaggAfAfCfugauuacaaa | 236 | GGACAAGGAACUGAUUACAAA | 573 |
| AM13158-SS-NL | gscaugguaCfCfAfcauauaucaa | 237 | GCAUGGUACCACAUAUAUCAA | 525 |
| AM13159-SS-NL | gsuacugacAfUfUfagauaaucaa | 238 | GUACUGACAUUAGAUAAUCAA | 581 |
| AM13161-SS-NL | gsgauguaaAfCfUfuacauagcua | 239 | GGAUGUAAACUUACAUAGCUA | 529 |
| AM13162-SS-NL | csauacaauGfCfUfaguuaaacaa | 240 | CAUACAAUGCUAGUUAAACAA | 559 |
| AM13542-SS-NL | usgcuguggUfuAfuAfccuacuaa | 241 | UGCUGUGGUUAUACCUACUAA | 582 |
| AM13544-SS-NL | gscaaucUfuAfaGfacacuucuuu | 242 | GCAAUCUUAAGACACUUCUUU | 583 |
| AM13546-SS-NL | gscugaaUfaAfgCfauauugacia | 243 | GCUGAAUAAGCAUAUUGACIA | 575 |
| AM14660-SS-NL | gcuucuuaAfGfAfgugcuuauga | 244 | GCUUCUUAAGAGUGCUUAUGA | 576 |
| AM14661-SS-NL | cuucuuaaGfAfGfugcuuaugaa | 245 | CUUCUUAAGAGUGCUUAUGAA | 584 |
| AM14663-SS-NL | cuuagacaAfUfGfucuuaucuaa | 246 | CUUAGACAAUGUCUUAUCUAA | 577 |
| AM14664-SS-NL | gcaccuuuGfAfCfaaucuuaaga | 247 | GCACCUUUGACAAUCUUAAGA | 580 |
| AM14665-SS-NL | ggaaguagUfGfGfaaaauccuaa | 248 | GGAAGUAGUGGAAAAUCCUAA | 521 |
| AM14691-SS-NL | gsgsaaguagUfGfGfaaaauccuasa | 249 | GGAAGUAGUGGAAAAUCCUAA | 521 |
| AM14860-SS-NL | gsuccaagaUfGfGfuauuucuaca | 250 | GUCCAAGAUGGUAUUUCUACA | 585 |
| AM15013-SS-NL | cauacaauGfCfUfaguuaaacaa | 251 | CAUACAAUGCUAGUUAAACAA | 559 |
| AM15014-SS-NL | caagauggUfAfUfuucuacuaca | 252 | CAAGAUGGUAUUUCUACUACA | 568 |
| AM15015-SS-NL | ggacaaggAfAfCfugauuacaaa | 253 | GGACAAGGAACUGAUUACAAA | 573 |
| AM15016-SS-NL | ccacuaaaGfCfAfuacaauguaa | 254 | CCACUAAAGCAUACAAUGUAA | 571 |
| AM15017-SS-NL | guccaagaUfGfGfuauuucuacu | 255 | GUCCAAGAUGGUAUUUCUACU | 567 |
| AM15564-SS-NL | ggaaguagUfgGfaAfaauccuaa | 256 | GGAAGUAGUGGAAAAUCCUAA | 521 |
| AM15567-SS-NL | cgaaguagUfgGfaAfaauccuaa | 257 | CGAAGUAGUGGAAAAUCCUAA | 586 |
| AM15571-SS-NL | cauacaauGfcUfaGfuuaaacaa | 258 | CAUACAAUGCUAGUUAAACAA | 559 |
| AM15573-SS-NL | cguacaauGfcUfaGfuuaaacaa | 259 | CGUACAAUGCUAGUUAAACAA | 587 |
| AM15577-SS-NL | guccaagaUfgGfuAfuuucuacu | 260 | GUCCAAGAUGGUAUUUCUACU | 567 |
| AM15581-SS-NL | guccaagaUfgGfuAfuuucuaca | 261 | GUCCAAGAUGGUAUUUCUACA | 585 |
| AM15796-SS-NL | ggacaaggAfaCfuGfauuacaaa | 262 | GGACAAGGAACUGAUUACAAA | 573 |
| AM15800-SS-NL | cgacaaggAfaCfuGfauuacaaa | 263 | CGACAAGGAACUGAUUACAAA | 588 |
| AM15802-SS-NL | cauaaucaGfGfAfuguaaacuua | 264 | CAUAAUCAGGAUGUAAACUUA | 528 |
| AM15805-SS-NL | cauaaucaGfgAfuGfuaaacuua | 265 | CAUAAUCAGGAUGUAAACUUA | 528 |
| AM15806-SS-NL | cguaaucaGfgAfuGfuaaacuua | 266 | CGUAAUCAGGAUGUAAACUUA | 589 |
| AM15809-SS-NL | ggauguaaAfCfUfuacauagcua | 267 | GGAUGUAAACUUACAUAGCUA | 529 |
| AM15811-SS-NL | ggauguaaAfcUfuAfcauagcua | 268 | GGAUGUAAACUUACAUAGCUA | 529 |
| AM15814-SS-NL | gcaccuuuGfaCfaAfucuuaaga | 269 | GCACCUUUGACAAUCUUAAGA | 580 |
| AM15817-SS-NL | ugcuguggUfUfAfuaccuacuaa | 270 | UGCUGUGGUUAUACCUACUAA | 582 |
| AM15819-SS-NL | gacaaucuUfAfAfgacacuucuu | 271 | GACAAUCUUAAGACACUUCUU | 590 |
| AM15821-SS-NL | caugggcaCfAfCfuuucuuauga | 272 | CAUGGGCACACUUUCUUAUGA | 591 |
| AM15823-SS-NL | acagaaauUfGfAfcccuaaguua | 273 | ACAGAAAUUGACCCUAAGUUA | 592 |
| AM15825-SS-NL | gaugcuuaCfGfUfuaauacguuu | 274 | GAUGCUUACGUUAAUACGUUU | 579 |
| AM15827-SS-NL | caagcuauGfAfCfccaaauguau | 275 | CAAGCUAUGACCCAAAUGUAU | 523 |
| AM15829-SS-NL | ugucgauuCfAfGfaucuuaauga | 276 | UGUCGAUUCAGAUCUUAAUGA | 593 |
| AM15831-SS-NL | gcuugcuuUfCfGfugguauucuu | 277 | GCUUGCUUUCGUGGUAUUCUU | 544 |
| AM16518-SS-NL | agacaaggAfaCfuGfauuacaaa | 278 | AGACAAGGAACUGAUUACAAA | 594 |
| AM16520-SS-NL | cguaaucaGfGfAfuguaaacuua | 279 | CGUAAUCAGGAUGUAAACUUA | 589 |
| AM16965-SS-NL | csgaaguagUfgGfaAfaauccuaa | 280 | CGAAGUAGUGGAAAAUCCUAA | 586 |
| AM16967-SS-NL | gsgacaaggAfaCfuGfauuacaaa | 281 | GGACAAGGAACUGAUUACAAA | 573 |
| AM16968-SS-NL | usgcuguggUfUfAfuaccuacuaa | 282 | UGCUGUGGUUAUACCUACUAA | 582 |
| AM16969-SS-NL | csauacaauGfcUfaGfuuaaacaa | 283 | CAUACAAUGCUAGUUAAACAA | 559 |
| AM16970-SS-NL | csguaaucaGfgAfuGfuaaacuua | 284 | CGUAAUCAGGAUGUAAACUUA | 589 |

a_2N, (A^{2N})= 2-aminoadenosine nucleotide;
I= hypoxanthine (inosine) nucleotide

TABLE 4B
Further CoV RNAi Agent Sense Strand Sequences
(Shown Without Linkers, Conjugates, or Capping Moieties.)

| | | | Underlying | |
|---|---|---|---|---|
| | | | Base Sequence | |
| | | SEQ | (5′ → 3′) (Shown | SEQ |
| | Modified Sense Strand | ID | as an Unmodified | ID |
| Strand ID | (5′ → 3′) | NO. | Nucleotide Sequence) | NO. |
| AM18937-SS-NL | ugcuguggUfuAfuAfccuacuaa | 285 | UGCUGUGGUUAUACCUACUAA | 582 |
| AM18941-SS-NL | ugcuguggUfuAfUfaccuacuaa | 286 | UGCUGUGGUUAUACCUACUAA | 582 |
| AM19332-SS-NL | cgacaaggAfAfCfugauuacaaa | 287 | CGACAAGGAACUGAUUACAAA | 588 |
| AM19414-SS-NL | ugcuguggUfuAfuaccuacuaa | 288 | UGCUGUGGUUAUACCUACUAA | 582 |
| AM19418-SS-NL | ggacaaggAfaCfugauuacaaa | 289 | GGACAAGGAACUGAUUACAAA | 573 |
| AM20438-SS-NL | usgcuguggUfuAfuaccuacuaa | 290 | UGCUGUGGUUAUACCUACUAA | 582 |

TABLE 5A
CoV RNAi Agent Sense Strand Sequences (Shown With (TriAlk14) Linker or
(NAG37) Targeting Ligand (see Table 11 for structure information.))

| | | | Underlying | |
|---|---|---|---|---|
| | | | Base Sequence | |
| | | SEQ | (5′ → 3′) (Shown | SEQ |
| | Modified Sense Strand | ID | as an Unmodified | ID |
| Strand ID | (5′ → 3′) | NO. | Nucleotide Sequence) | NO. |
| AM11996-SS | (invAb)sgacacacgUfCfCfaacucaguuus(invAb) | 291 | GACACACGUCCAACUCAGUUU | 519 |
| AM11998-SS | (invAb)sggaagaagUfAfGfuggaaaaucas(invAb) | 292 | GGAAGAAGUAGUGGAAAAUCA | 520 |
| AM12000-SS | (invAb)sggaaguagUfGfGfaaaauccuaas(invAb) | 293 | GGAAGUAGUGGAAAAUCCUAA | 521 |
| AM12002-SS | (invAb)sgucaugugGfUfAfguguuiguuus(invAb) | 294 | GUCAUGUGGUAGUGUUIGUUU | 522 |
| AM12004-SS | (invAb)scaagcuauGfAfCfccaaauguaus(invAb) | 295 | CAAGCUAUGACCCAAAUGUAU | 523 |
| AM12006-SS | (invAb)sgacaugguAfCfCfacauauaucas(invAb) | 296 | GACAUGGUACCACAUAUAUCA | 524 |
| AM12008-SS | (invAb)sgcaugguaCfCfAfcauauaucaas(invAb) | 297 | GCAUGGUACCACAUAUAUCAA | 525 |
| AM12010-SS | (invAb)sgguacauaAfUfCfaggauguaaas(invAb) | 298 | GGUACAUAAUCAGGAUGUAAA | 526 |
| AM12012-SS | (invAb)sgcauaaucAfGfGfauguaaacuus(invAb) | 299 | GCAUAAUCAGGAUGUAAACUU | 527 |
| AM12014-SS | (invAb)sca_2NuaaucaGfGfAfuguaaacuuas(invAb) | 300 | C(A^{2N})UAAUCAGGAUGUAAACUUA | 595 |
| AM12016-SS | (invAb)sggauguaaAfCfUfuacauagcuas(invAb) | 301 | GGAUGUAAACUUACAUAGCUA | 529 |
| AM12018-SS | (invAb)sgguaaggcUfAfGfacuuuauua_2Nus(invAb) | 302 | GGUAAGGCUAGACUUUAUU(A^{2N})U | 596 |
| AM12020-SS | (invAb)suggugucuCfUfAfucuguaguaas(invAb) | 303 | UGGUGUCUCUAUCUGUAGUAA | 531 |
| AM12022-SS | (invAb)sgucucuauCfUfGfuaguacuauas(invAb) | 304 | GUCUCUAUCUGUAGUACUAUA | 532 |
| AM12024-SS | (invAb)sgcucuaucUfGfUfaguacuaugas(invAb) | 305 | GCUCUAUCUGUAGUACUAUGA | 533 |
| AM12026-SS | (invAb)sgcuaucugUfAfGfuacuaugacas(invAb) | 306 | GCUAUCUGUAGUACUAUGACA | 534 |
| AM12028-SS | (invAb)sgucuagcaAfUfGfuugcaaa_2Nuuas(invAb) | 307 | GUCUAGCAAUGUUGCAA(A^{2N})UUA | 597 |
| AM12030-SS | (invAb)sga_2NagacucAfUfCfucuaugaugas(invAb) | 308 | G(A^{2N})AGACUCAUCUCUAUGAUGA | 598 |
| AM12032-SS | (invAb)sguggagucAfCfAfuuaauuggaas(invAb) | 309 | GUGGAGUCACAUUAAUUGGAA | 537 |
| AM12034-SS | (invAb)sggaugaguAfCfGfaacuuauguas(invAb) | 310 | GGAUGAGUACGAACUUAUGUA | 538 |
| AM12036-SS | (invAb)sacgaacuuAfUfGfuacucauucas(invAb) | 311 | ACGAACUUAUGUACUCAUUCA | 539 |
| AM12038-SS | (invAb)scgaacuuaUfGfUfacucauucgus(invAb) | 312 | CGAACUUAUGUACUCAUUCGU | 540 |
| AM12040-SS | (invAb)scuuauguaCfUfCfauucguuucas(invAb) | 313 | CUUAUGUACUCAUUCGUUUCA | 541 |
| AM12042-SS | (invAb)scuuauguaCfUfCfauuciuuucas(invAb) | 314 | CUUAUGUACUCAUUCIUUUCA | 542 |
| AM12043-SS | (invAb)sguaguuaaUfAfGfcguacuucuus(invAb) | 315 | GUAGUUAAUAGCGUACUUCUU | 543 |
| AM12045-SS | (invAb)sgcuugcuuUfCfGfugguauucuus(invAb) | 316 | GCUUGCUUUCGUGGUAUUCUU | 544 |
| AM12047-SS | (invAb)sguacacuaGfCfCfauccuuacuas(invAb) | 317 | GUACACUAGCCAUCCUUACUA | 545 |
| AM12049-SS | (invAb)sguacugcuGfCfAfauauuguuaas(invAb) | 318 | GUACUGCUGCAAUAUUGUUAA | 546 |
| AM12051-SS | (invAb)scugcugcaAfUfAfuuguuaacgus(invAb) | 319 | CUGCUGCAAUAUUGUUAACGU | 547 |
| AM12053-SS | (invAb)sugcugcaaUfAfUfuguuaacguas(invAb) | 320 | UGCUGCAAUAUUGUUAACGUA | 548 |
| AM12055-SS | (invAb)sugcugcaaUfa_2NUfuguuaacguas(invAb) | 321 | UGCUGCAAU(A^{2N})UUGUUAACGUA | 599 |
| AM12056-SS | (invAb)sccugaucuUfCfUfggucuaaacas(invAb) | 322 | CCUGAUCUUCUGGUCUAAACA | 549 |
| AM12058-SS | (invAb)scaucacgaAfCfGfcuuucuuauus(invAb) | 323 | CAUCACGAACGCUUUCUUAUU | 550 |
| AM12060-SS | (invAb)scaucacgaAfCfGfcuuucuua_2Nuus(invAb) | 324 | CAUCACGAACGCUUUCUU(A^{2N})UU | 600 |
| AM12061-SS | (invAb)scgaacgcuUfUfCfuuauuacaaas(invAb) | 325 | CGAACGCUUUCUUAUUACAAA | 551 |
| AM12063-SS | (invAb)sgacaguaaGfUfGfacaacagauas(invAb) | 326 | GACAGUAAGUGACAACAGAUA | 552 |
| AM12065-SS | (invAb)scaguaaguGfAfCfaacagauguus(invAb) | 327 | CAGUAAGUGACAACAGAUGUU | 553 |
| AM12067-SS | (invAb)sca_2NaauuggAfUfGfacaaagaucas(invAb) | 328 | C(A^{2N})AAUUGGAUGACAAAGAUCA | 601 |
| AM12069-SS | (invAb)scucacauaGfCfAfaucuuuaa_2Nuas(invAb) | 329 | CUCACAUAGCAAUCUUUA(A^{2N})UA | 602 |
| AM12468-SS | (invAb)sccuuuugaUfGfUfuguuagacaas(invAb) | 330 | CCUUUUGAUGUUGUUAGACAA | 556 |
| AM12470-SS | (invAb)sugguaaugCfUfUfuagaucaagas(invAb) | 331 | UGGUAAUGCUUUAGAUCAAGA | 557 |
| AM12472-SS | (invAb)sgcauacaaUfGfCfuaguuaaacas(invAb) | 332 | GCAUACAAUGCUAGUUAAACA | 558 |
| AM12474-SS | (invAb)sca_2NuacaauGfCfUfaguuaaacaas(invAb) | 333 | C(A^{2N})UACAAUGCUAGUUAAACAA | 603 |
| AM12476-SS | (invAb)sgugcauaaUfGfUfcugauagagas(invAb) | 334 | GUGCAUAAUGUCUGAUAGAGA | 560 |
| AM12478-SS | (invAb)sggucgauuCfAfGfaucuuaaugas(invAb) | 335 | GGUCGAUUCAGAUCUUAAUGA | 561 |
| AM12480-SS | (invAb)sgguccagaUfGfAfccaaauuggas(invAb) | 336 | GGUCCAGAUGACCAAAUUGGA | 562 |
| AM12482-SS | (invAb)sgccgcaaaUfUfGfcacaauuugas(invAb) | 337 | GCCGCAAAUUGCACAAUUUGA | 563 |
| AM12484-SS | (invAb)sgugacgcaUfAfCfaaaacauucas(invAb) | 338 | GUGACGCAUACAAAACAUUCA | 564 |
| AM12562-SS | (invAb)sca_2NaggaagAfCfCfuuaaauuccas(invAb) | 339 | C(A^{2N})AGGAAGACCUUAAAUUCCA | 604 |
| AM12564-SS | (invAb)sguccaauuAfAfCfaccaauagcas(invAb) | 340 | GUCCAAUUAACACCAAUAGCA | 566 |
| AM12566-SS | (invAb)sguccaagaUfGfGfuauuucuacus(invAb) | 341 | GUCCAAGAUGGUAUUUCUACU | 567 |
| AM12568-SS | (invAb)sca_2NagauggUfAfUfuucuacuacas(invAb) | 342 | C(A^{2N})AGAUGGUAUUUCUACUACA | 605 |
| AM12570-SS | (invAb)sgugaauacAfCfCfaaaagaucaas(invAb) | 343 | GUGAAUACACCAAAAGAUCAA | 569 |
| AM12572-SS | (invAb)scugucacuAfAfGfaaaucuicuas(invAb) | 344 | CUGUCACUAAGAAAUCUICUA | 570 |
| AM12574-SS | (invAb)sccacuaaaGfCfAfuacaauguaas(invAb) | 345 | CCACUAAAGCAUACAAUGUAA | 571 |
| AM12576-SS | (invAb)sgcagacaaGfGfAfacugauuacas(invAb) | 346 | GCAGACAAGGAACUGAUUACA | 572 |
| AM12578-SS | (invAb)sggacaaggAfAfCfugauuacaaas(invAb) | 347 | GGACAAGGAACUGAUUACAAA | 573 |
| AM12580-SS | (invAb)sggaacugaUfUfAfcaaacauugas(invAb) | 348 | GGAACUGAUUACAAACAUUGA | 574 |
| AM12582-SS | (invAb)sgcugaauaAfGfCfauauugacias(invAb) | 349 | GCUGAAUAAGCAUAUUGACIA | 575 |
| AM13119-SS | (TriAlk14)gscuucuuaAfGfAfgugcuuaugas(invAb) | 350 | GCUUCUUAAGAGUGCUUAUGA | 576 |
| AM13121-SS | (TriAlk14)csuuagacaAfUfGfucuuaucuaas(invAb) | 351 | CUUAGACAAUGUCUUAUCUAA | 577 |
| AM13123-SS | (TriAlk14)gscauuaauGfGfCfaaucuucauas(invAb) | 352 | GCAUUAAUGGCAAUCUUCAUA | 578 |
| AM13125-SS | (TriAlk14)gsaugcuuaCfGfUfuaauacguuus(invAb) | 353 | GAUGCUUACGUUAAUACGUUU | 579 |
| AM13127-SS | (TriAlk14)gscaccuuuGfAfCfaaucuuaagas(invAb) | 354 | GCACCUUUGACAAUCUUAAGA | 580 |
| AM13129-SS | (TriAlk14)gsgaaguagUfGfGfaaaauccuaas(invAb) | 355 | GGAAGUAGUGGAAAAUCCUAA | 521 |
| AM13130-SS | (TriAlk14)cscuuuugaUfGfUfuguuagacaas(invAb) | 356 | CCUUUUGAUGUUGUUAGACAA | 556 |
| AM13131-SS | (TriAlk14)usgguaaugCfUfUfuagaucaagas(invAb) | 357 | UGGUAAUGCUUUAGAUCAAGA | 557 |
| AM13132-SS | (TriAlk14)csaagcuauGfAfCfccaaauguaus(invAb) | 358 | CAAGCUAUGACCCAAAUGUAU | 523 |
| AM13133-SS | (TriAlk14)gsuccaagaUfGfGfuauuucuacus(invAb) | 359 | GUCCAAGAUGGUAUUUCUACU | 567 |
| AM13134-SS | (TriAlk14)csaagauggUfAfUfuucuacuacas(invAb) | 360 | CAAGAUGGUAUUUCUACUACA | 568 |
| AM13135-SS | (TriAlk14)cscacuaaaGfCfAfuacaauguaas(invAb) | 361 | CCACUAAAGCAUACAAUGUAA | 571 |
| AM13136-SS | (TriAlk14)gsgacaaggAfAfCfugauuacaaas(invAb) | 362 | GGACAAGGAACUGAUUACAAA | 573 |
| AM13158-SS | (TriAlk14)gscaugguaCfCfAfcauauaucaas(invAb) | 363 | GCAUGGUACCACAUAUAUCAA | 525 |
| AM13159-SS | (TriAlk14)gsuacugacAfUfUfagauaaucaas(invAb) | 364 | GUACUGACAUUAGAUAAUCAA | 581 |
| AM13161-SS | (TriAlk14)gsgauguaaAfCfUfuacauagcuas(invAb) | 365 | GGAUGUAAACUUACAUAGCUA | 529 |
| AM13162-SS | (TriAlk14)csauacaauGfCfUfaguuaaacaas(invAb) | 366 | CAUACAAUGCUAGUUAAACAA | 559 |
| AM13542-SS | (TriAlk14)usgcuguggUfuAfuAfccuacuaas(invAb) | 367 | UGCUGUGGUUAUACCUACUAA | 582 |
| AM13544-SS | (TriAlk14)gscaaucUfuAfaGfacacuucuuus(invAb) | 368 | GCAAUCUUAAGACACUUCUUU | 583 |
| AM13546-SS | (TriAlk14)gscugaaUfaAfgCfauauugacias(invAb) | 369 | GCUGAAUAAGCAUAUUGACIA | 575 |
| AM14660-SS | (NAG37)s(invAb)sgcuucuuaAfGfAfgugcuuaugas(invAb) | 370 | GCUUCUUAAGAGUGCUUAUGA | 576 |
| AM14661-SS | (NAG37)s(invAb)scuucuuaaGfAfGfugcuuaugaas(invAb) | 371 | CUUCUUAAGAGUGCUUAUGAA | 584 |
| AM14663-SS | (NAG37)s(invAb)scuuagacaAfUfGfucuuaucuaas(invAb) | 372 | CUUAGACAAUGUCUUAUCUAA | 577 |
| AM14664-SS | (NAG37)s(invAb)sgcaccuuuGfAfCfaaucuuaagas(invAb) | 373 | GCACCUUUGACAAUCUUAAGA | 580 |
| AM14665-SS | (NAG37)s(invAb)sggaaguagUfGfGfaaaauccuaas(invAb) | 374 | GGAAGUAGUGGAAAAUCCUAA | 521 |
| AM14691-SS | (invAb)sgsgsaaguagUfGfGfaaaauccuasa | 375 | GGAAGUAGUGGAAAAUCCUAA | 521 |
| AM14860-SS | (TriAlk14)gsuccaagaUfGfGfuauuucuacas(invAb) | 376 | GUCCAAGAUGGUAUUUCUACA | 585 |
| AM15013-SS | (NAG37)s(invAb)scauacaauGfCfUfaguuaaacaas(invAb) | 377 | CAUACAAUGCUAGUUAAACAA | 559 |
| AM15014-SS | (NAG37)s(invAb)scaagauggUfAfUfuucuacuacas(invAb) | 378 | CAAGAUGGUAUUUCUACUACA | 568 |
| AM15015-SS | (NAG37)s(invAb)sggacaaggAfAfCfugauuacaaas(invAb) | 379 | GGACAAGGAACUGAUUACAAA | 573 |
| AM15016-SS | (NAG37)s(invAb)sccacuaaaGfCfAfuacaauguaas(invAb) | 380 | CCACUAAAGCAUACAAUGUAA | 571 |
| AM15017-SS | (NAG37)s(invAb)sguccaagaUfGfGfuauuucuacus(invAb) | 381 | GUCCAAGAUGGUAUUUCUACU | 567 |
| AM15564-SS | (NAG37)s(invAb)sggaaguagUfgGfaAfaauccuaas(invAb) | 382 | GGAAGUAGUGGAAAAUCCUAA | 521 |
| AM15567-SS | (NAG37)s(invAb)scgaaguagUfgGfaAfaauccuaas(invAb) | 383 | CGAAGUAGUGGAAAAUCCUAA | 586 |
| AM15571-SS | (NAG37)s(invAb)scauacaauGfcUfaGfuuaaacaas(invAb) | 384 | CAUACAAUGCUAGUUAAACAA | 559 |
| AM15573-SS | (NAG37)s(invAb)scguacaauGfcUfaGfuuaaacaas(invAb) | 385 | CGUACAAUGCUAGUUAAACAA | 587 |
| AM15577-SS | (NAG37)s(invAb)sguccaagaUfgGfuAfuuucuacus(invAb) | 386 | GUCCAAGAUGGUAUUUCUACU | 567 |
| AM15581-SS | (NAG37)s(invAb)sguccaagaUfgGfuAfuuucuacas(invAb) | 387 | GUCCAAGAUGGUAUUUCUACA | 585 |
| AM15796-SS | (NAG37)s(invAb)sggacaaggAfaCfuGfauuacaaas(invAb) | 388 | GGACAAGGAACUGAUUACAAA | 573 |
| AM15800-SS | (NAG37)s(invAb)scgacaaggAfaCfuGfauuacaaas(invAb) | 389 | CGACAAGGAACUGAUUACAAA | 588 |
| AM15802-SS | (NAG37)s(invAb)scauaaucaGfGfAfuguaaacuuas(invAb) | 390 | CAUAAUCAGGAUGUAAACUUA | 528 |
| AM15805-SS | (NAG37)s(invAb)scauaaucaGfgAfuGfuaaacuuas(invAb) | 391 | CAUAAUCAGGAUGUAAACUUA | 528 |
| AM15806-SS | (NAG37)s(invAb)scguaaucaGfgAfuGfuaaacuuas(invAb) | 392 | CGUAAUCAGGAUGUAAACUUA | 589 |
| AM15809-SS | (NAG37)s(invAb)sggauguaaAfCfUfuacauagcuas(invAb) | 393 | GGAUGUAAACUUACAUAGCUA | 529 |
| AM15811-SS | (NAG37)s(invAb)sggauguaaAfcUfuAfcauagcuas(invAb) | 394 | GGAUGUAAACUUACAUAGCUA | 529 |
| AM15814-SS | (NAG37)s(invAb)sgcaccuuuGfaCfaAfucuuaagas(invAb) | 395 | GCACCUUUGACAAUCUUAAGA | 580 |
| AM15817-SS | (NAG37)s(invAb)sugcuguggUfUfAfuaccuacuaas(invAb) | 396 | UGCUGUGGUUAUACCUACUAA | 582 |
| AM15819-SS | (NAG37)s(invAb)sgacaaucuUfAfAfgacacuucuus(invAb) | 397 | GACAAUCUUAAGACACUUCUU | 590 |
| AM15821-SS | (NAG37)s(invAb)scaugggcaCfAfCfuuucuuaugas(invAb) | 398 | CAUGGGCACACUUUCUUAUGA | 591 |
| AM15823-SS | (NAG37)s(invAb)sacagaaauUfGfAfcccuaaguuas(invAb) | 399 | ACAGAAAUUGACCCUAAGUUA | 592 |
| AM15825-SS | (NAG37)s(invAb)sgaugcuuaCfGfUfuaauacguuus(invAb) | 400 | GAUGCUUACGUUAAUACGUUU | 579 |
| AM15827-SS | (NAG37)s(invAb)scaagcuauGfAfCfccaaauguaus(invAb) | 401 | CAAGCUAUGACCCAAAUGUAU | 523 |
| AM15829-SS | (NAG37)s(invAb)sugucgauuCfAfGfaucuuaaugas(invAb) | 402 | UGUCGAUUCAGAUCUUAAUGA | 593 |
| AM15831-SS | (NAG37)s(invAb)sgcuugcuuUfCfGfugguauucuus(invAb) | 403 | GCUUGCUUUCGUGGUAUUCUU | 544 |
| AM16518-SS | (NAG37)s(invAb)sagacaaggAfaCfuGfauuacaaas(invAb) | 404 | AGACAAGGAACUGAUUACAAA | 594 |
| AM16520-SS | (NAG37)s(invAb)scguaaucaGfGfAfuguaaacuuas(invAb) | 405 | CGUAAUCAGGAUGUAAACUUA | 589 |
| AM16965-SS | (TriAlk14)csgaaguagUfgGfaAfaauccuaas(invAb) | 406 | CGAAGUAGUGGAAAAUCCUAA | 586 |
| AM16967-SS | (TriAlk14)gsgacaaggAfaCfuGfauuacaaas(invAb) | 407 | GGACAAGGAACUGAUUACAAA | 573 |
| AM16968-SS | (TriAlk14)usgcuguggUfUfAfuaccuacuaas(invAb) | 408 | UGCUGUGGUUAUACCUACUAA | 582 |
| AM16969-SS | (TriAlk14)csauacaauGfcUfaGfuuaaacaas(invAb) | 409 | CAUACAAUGCUAGUUAAACAA | 559 |
| AM16970-SS | (TriAlk14)csguaaucaGfgAfuGfuaaacuuas(invAb) | 410 | CGUAAUCAGGAUGUAAACUUA | 589 |

a_2N, (A^{2N})= 2-aminoadenosine nucleotide;
I= hypoxanthine (inosine) nucleotide

TABLE 5B
Further CoV RNAi Agent Sense Strand Sequences (Shown With (TriAlk14) Linker or
(NAG37) Targeting Ligand (see Table 11 for structure information.))

| | | | Underlying | |
|---|---|---|---|---|
| | | | Base Sequence | |
| | | SEQ | (5′ → 3′) (Shown | SEQ |
| | Modified Sense Strand | ID | as an Unmodified | ID |
| Strand ID | (5′ → 3′) | NO. | Nucleotide Sequence) | NO. |
| AM18937-SS | (NAG37)s(invAb)sugcuguggUfuAfuAfccuacuaas(invAb) | 411 | UGCUGUGGUUAUACCUACUAA | 582 |
| AM18941-SS | (NAG37)s(invAb)sugcuguggUfuAfUfaccuacuaas(invAb) | 412 | UGCUGUGGUUAUACCUACUAA | 582 |
| AM19332-SS | (NAG37)s(invAb)scgacaaggAfAfCfugauuacaaas(invAb) | 413 | CGACAAGGAACUGAUUACAAA | 588 |
| AM19414-SS | (NAG37)s(invAb)sugcuguggUfuAfuaccuacuaas(invAb) | 414 | UGCUGUGGUUAUACCUACUAA | 582 |
| AM19418-SS | (NAG37)s(invAb)sggacaaggAfaCfugauuacaaas(invAb) | 415 | GGACAAGGAACUGAUUACAAA | 573 |
| AM20438-SS | (TriAlk14)usgcuguggUfuAfuaccuacuaas(invAb) | 416 | UGCUGUGGUUAUACCUACUAA | 582 |

TABLE 6A
CoV RNAi Agent Sense Strand Sequences (Shown with Targeting Ligand Conjugate.
The structure of avß6-SM6.1 is shown in Table 11, and the structure of
Tri-SM6.1-avB6-TA14 is shown in FIG. 1.)

| | | | Corresponding |
|---|---|---|---|
| | | | Sense Strand |
| | | | AM Number |
| | | | Without |
| | | SEQ | Linker or |
| | | ID | Conjugate |
| Strand ID | Modified Sense Strand (5′ → 3′) | NO. | (See Table 4) |
| CS001679 | Tri-SM6.1-avb6-TA14-gscuucuuaAfGfAfgugcuuaugas(invAb) | 417 | AM13119-SS-NL |
| CS001681 | Tri-SM6.1-avb6-TA14-csuuagacaAfUfGfucuuaucuaas(invAb) | 418 | AM13121-SS-NL |
| CS001683 | Tri-SM6.1-avb6-TA14-gscauuaauGfGfCfaaucuucauas(invAb) | 419 | AM13123-SS-NL |
| CS001685 | Tri-SM6.1-avb6-TA14-gsaugcuuaCfGfUfuaauacguuus(invAb) | 420 | AM13125-SS-NL |
| CS001687 | Tri-SM6.1-avb6-TA14-gscaccuuuGfAfCfaaucuuaagas(invAb) | 421 | AM13127-SS-NL |
| CS001689 | Tri-SM6.1-avb6-TA14-gsgaaguagUfGfGfaaaauccuaas(invAb) | 422 | AM13129-SS-NL |
| CS001691 | Tri-SM6.1-avb6-TA14-cscuuuugaUfGfUfuguuagacaas(invAb) | 423 | AM13130-SS-NL |
| CS001693 | Tri-SM6.1-avb6-TA14-usgguaaugCfUfUfuagaucaagas(invAb) | 424 | AM13131-SS-NL |
| CS001695 | Tri-SM6.1-avb6-TA14-csaagcuauGfAfCfccaaauguaus(invAb) | 425 | AM13132-SS-NL |
| CS001697 | Tri-SM6.1-avb6-TA14-gsuccaagaUfGfGfuauuucuacus(invAb) | 426 | AM13133-SS-NL |
| CS001699 | Tri-SM6.1-avb6-TA14-csaagauggUfAfUfuucuacuacas(invAb) | 427 | AM13134-SS-NL |
| CS001701 | Tri-SM6.1-avb6-TA14-cscacuaaaGfCfAfuacaauguaas(invAb) | 428 | AM13135-SS-NL |
| CS001703 | Tri-SM6.1-avb6-TA14-gsgacaaggAfAfCfugauuacaaas(invAb) | 429 | AM13136-SS-NL |
| CS001705 | Tri-SM6.1-avb6-TA14-gscaugguaCfCfAfcauauaucaas(invAb) | 430 | AM13158-SS-NL |
| CS001707 | Tri-SM6.1-avb6-TA14-gsuacugacAfUfUfagauaaucaas(invAb) | 431 | AM13159-SS-NL |
| CS001709 | Tri-SM6.1-avb6-TA14-gsgauguaaAfCfUfuacauagcuas(invAb) | 432 | AM13161-SS-NL |
| CS001711 | Tri-SM6.1-avb6-TA14-csauacaauGfCfUfaguuaaacaas(invAb) | 433 | AM13162-SS-NL |
| CS001891 | Tri-SM6.1-avb6-TA14-usgcuguggUfuAfuAfccuacuaas(invAb) | 434 | AM13542-SS-NL |
| CS001893 | Tri-SM6.1-avb6-TA14-gscaaucUfuAfaGfacacuucuuus(invAb) | 435 | AM13544-SS-NL |
| CS001895 | Tri-SM6.1-avb6-TA14-gscugaaUfaAfgCfauauugacias(invAb) | 436 | AM13546-SS-NL |
| CS002495 | Tri-SM6.1-avb6-TA14-gsuccaagaUfGfGfuauuucuacas(invAb) | 437 | AM14860-SS-NL |
| CS003334 | Tri-SM6.1-avb6-TA14-csgaaguagUfgGfaAfaauccuaas(invAb) | 438 | AM16965-SS-NL |
| CS003337 | Tri-SM6.1-avb6-TA14-gsgacaaggAfaCfuGfauuacaaas(invAb) | 439 | AM16967-SS-NL |
| CS003340 | Tri-SM6.1-avb6-TA14-usgcuguggUfUfAfuaccuacuaas(invAb) | 440 | AM16968-SS-NL |
| CS003342 | Tri-SM6.1-avb6-TA14-csauacaauGfcUfaGfuuaaacaas(invAb) | 441 | AM16969-SS-NL |
| CS003344 | Tri-SM6.1-avb6-TA14-csguaaucaGfgAfuGfuaaacuuas(invAb) | 442 | AM16970-SS-NL |

TABLE 6B
Further CoV RNAi Agent Sense Strand Sequences (Shown with Targeting Ligand Conjugate.
The structure of avß6-SM6.1 is shown in Table 11, and the structure of
Tri-SM6.1-avß6-TA14 is shown in FIG. 1.)

| | | | Corresponding |
|---|---|---|---|
| | | | Sense Strand |
| | | SEQ | AM Numbe rWithout |
| | | ID | Linker or Conjugate |
| Strand ID | Modified Sense Strand (5′ → 3′) | NO. | (See Table 4) |
| CS004352 | Tri-SM6.1-avb6-TA14-usgcuguggUfuAfuaccuacuaas(invAb) | 443 | AM20438-SS-NL |

[0147] The CoV RNAi agents disclosed herein are formed by annealing an antisense strand with a sense strand. A sense strand containing a sequence listed in Table 2, Table 4, Table 5, or Table 6 can be hybridized to any antisense strand containing a sequence listed in Table 3B, provided the two sequences have a region of at least 85% complementarity over a contiguous 16, 17, 18, 19, 20, or 21 nucleotide sequence.

[0148] As shown in Table 5B above, certain of the example CoV RNAi agent nucleotide sequences are shown to further include reactive linking groups at one or both of the 5′ terminal end and the 3′ terminal end of the sense strand. For example, many of the CoV RNAi agent sense strand sequences shown in Table 5 above have a (TriAlk14) linking group at the 5′ end of the nucleotide sequence. Other linking groups, such as an (NH2-C6) linking group or a (6-SS-6) or (C6-SS—C6) linking group, may be present as well or alternatively in certain embodiments. Such reactive linking groups are positioned to facilitate the linking of targeting ligands, targeting groups, and/or PK/PD modulators to the CoV RNAi agents disclosed herein. Linking or conjugation reactions are well known in the art and provide for formation of covalent linkages between two molecules or reactants. Suitable conjugation reactions for use in the scope of the inventions herein include, but are not limited to, amide coupling reaction, Michael addition reaction, hydrazone formation reaction, inverse-demand Diels-Alder cycloaddition reaction, oxime ligation, and Copper (I)-catalyzed or strain-promoted azide-alkyne cycloaddition reaction cycloaddition reaction.

[0149] In some embodiments, targeting ligands, such as the integrin targeting ligands shown in the examples and figures disclosed herein, can be synthesized as activated esters, such as tetrafluorophenyl (TFP) esters, which can be displaced by a reactive amino group (e.g., NH₂-C₆) to attach the targeting ligand to the CoV RNAi agents disclosed herein. In some embodiments, targeting ligands are synthesized as azides, which can be conjugated to a propargyl (e.g., TriAlk14) or DBCO group, for example, via Copper (I)-catalyzed or strain-promoted azide-alkyne cycloaddition reaction.

[0150] Additionally, certain of the nucleotide sequences can be synthesized with a dT nucleotide at the 3′ terminal end of the sense strand, followed by (3′→5′) a linker (e.g., C6-SS—C6). The linker can, in some embodiments, facilitate the linkage to additional components, such as, for example, a PK/PD modulator or one or more targeting ligands. As described herein, the disulfide bond of C6-SS—C6 is first reduced, removing the dT from the molecule, which can then facilitate the conjugation of the desired PK/PD modulator. The terminal dT nucleotide therefore is not a part of the fully conjugated construct.

[0151] In some embodiments, the antisense strand of a CoV RNAi agent disclosed herein differs by 0, 1, 2, or 3 nucleotides from any of the antisense strand sequences in Table 3B or Table 10B. In some embodiments, the sense strand of a CoV RNAi agent disclosed herein differs by 0, 1, 2, or 3 nucleotides from any of the sense strand sequences in Table 4B, Table 5B, Table 6B, or Table 10B.

[0152] In some embodiments, a CoV RNAi agent antisense strand comprises a nucleotide sequence of any of the sequences in Table 2 or Table 3. In some embodiments, a CoV RNAi agent antisense strand comprises the sequence of nucleotides (from 5′ end→3′ end) 1-17, 2-17, 1-18, 2-18, 1-19, 2-19, 1-20, 2-20, 1-21, 2-21, 1-22, 2-22, 1-23, 2-23, 1-24, or 2-24 of any of the sequences in Table 3B or Table 10B. In certain embodiments, a CoV RNAi agent antisense strand comprises or consists of a modified sequence of any one of the modified sequences in Table 3B or Table 10B.

[0153] In some embodiments, a CoV RNAi agent sense strand comprises the nucleotide sequence of any of the sequences in Table 2 or Table 4. In some embodiments, a CoV RNAi agent sense strand comprises the sequence of nucleotides (from 5′ end→3′ end) 1-17, 2-17, 3-17, 4-17, 1-18, 2-18, 3-18, 4-18, 1-19, 2-19, 3-19, 4-19, 1-20, 2-20, 3-20, 4-20, 1-21, 2-21, 3-21, 4-21, 1-22, 2-22, 3-22, 4-22, 1-23, 2-23, 3-23, 4-23, 1-24, 2-24, 3-24, or 4-24, of any of the sequences in Table 4B, Table 5B, Table 6B, or Table 10B. In certain embodiments, a CoV RNAi agent sense strand comprises or consists of a modified sequence of any one of the modified sequences in Table 3B or Table 10B.

[0154] For the RNAi agents disclosed herein, the nucleotide at position 1 of the antisense strand (from 5′ end→3′ end) can be perfectly complementary to a SARS-CoV-2 viral genome, or can be non-complementary to a SARS-CoV-2 viral genome. In some embodiments, the nucleotide at position 1 of the antisense strand (from 5′ end→3′ end) is a U, A, or dT (or a modified version of U, A or dT). In some embodiments, the nucleotide at position 1 of the antisense strand (from 5′ end→3′ end) forms an A:U or U:A base pair with the sense strand.

[0155] In some embodiments, a CoV RNAi agent antisense strand comprises the sequence of nucleotides (from 5′ end→3′ end) 2-18 or 2-19 of any of the antisense strand sequences in Table 3B or Table 10B. In some embodiments, a SARS-CoV-2 RNAi sense strand comprises the sequence of nucleotides (from 5′ end→3′ end) 1-17 or 1-18 of any of the sense strand sequences in Table 4B, Table 5B, Table 6B, or Table 10B.

[0156] In some embodiments, a CoV RNAi agent includes (i) an antisense strand comprising the sequence of nucleotides (from 5′ end→3′ end) 2-18 or 2-19 of any of the antisense strand sequences in Table 3B or Table 10B, and (ii) a sense strand comprising the sequence of nucleotides (from 5′ end→3′ end) 1-17 or 1-18 of any of the sense strand sequences in Table 4B, Table 5B, Table 6B, or Table 10B.

[0157] A sense strand containing a sequence listed in Table 4B can be hybridized to any antisense strand containing a sequence listed in Table 3B provided the two sequences have a region of at least 85% complementarity over a contiguous 16, 17, 18, 19, 20, or 21 nucleotide sequence. In some embodiments, the CoV RNAi agent has a sense strand consisting of the modified sequence of any of the modified sequences in Table 4B, Table 5B, Table 6B, or Table 10B, and an antisense strand consisting of the modified sequence of any of the modified sequences in Table 3B or Table 10B. Certain representative sequence pairings are exemplified by the Duplex ID Nos. shown in Tables 7A-2, 7B-2, 8B, and 9B.

[0158] In some embodiments, a CoV RNAi agent comprises, consists of, or consists essentially of a duplex represented by any one of the Duplex ID Nos. presented herein. In some embodiments, a CoV RNAi agent consists of any of the Duplex ID Nos. presented herein. In some embodiments, a CoV RNAi agent comprises the sense strand and antisense strand nucleotide sequences of any of the Duplex ID Nos. presented herein. In some embodiments, a CoV RNAi agent comprises the sense strand and antisense strand nucleotide sequences of any of the Duplex ID Nos. presented herein and a targeting group, linking group, and/or other non-nucleotide group wherein the targeting group, linking group, and/or other non-nucleotide group is covalently linked (i.e., conjugated) to the sense strand or the antisense strand. In some embodiments, a CoV RNAi agent includes the sense strand and antisense strand modified nucleotide sequences of any of the Duplex ID Nos. presented herein. In some embodiments, a CoV RNAi agent comprises the sense strand and antisense strand modified nucleotide sequences of any of the Duplex ID Nos. presented herein and a targeting group, linking group, and/or other non-nucleotide group, wherein the targeting group, linking group, and/or other non-nucleotide group is covalently linked to the sense strand or the antisense strand.

[0159] In some embodiments, a CoV RNAi agent comprises an antisense strand and a sense strand having the nucleotide sequences of any of the antisense strand/sense strand duplexes of Tables 7A-2, 7B-2, 8B, 9B, or 10B, and comprises a targeting group. In some embodiments, a CoV RNAi agent comprises an antisense strand and a sense strand having the nucleotide sequences of any of the antisense strand/sense strand duplexes of Tables 7A-2, 7B-2, 8B, 9B, or 10B, and comprises one or more αvβ6 integrin targeting ligands.

[0160] In some embodiments, a CoV RNAi agent comprises an antisense strand and a sense strand having the nucleotide sequences of any of the antisense strand/sense strand duplexes of Tables 7A-2, 7B-2, 8B, 9B, or 10B, and comprises a targeting group that is an integrin targeting ligand. In some embodiments, a CoV RNAi agent comprises an antisense strand and a sense strand having the nucleotide sequences of any of the antisense strand/sense strand duplexes of Tables 7A-2, 7B-2, 8B, 9B, or 10B, and comprises one or more αvβ6 integrin targeting ligands or clusters of αvβ6 integrin targeting ligands (e.g., a tridentate αvβ6 integrin targeting ligand).

[0161] In some embodiments, a CoV RNAi agent comprises an antisense strand and a sense strand having the modified nucleotide sequences of any of the antisense strand/sense strand duplexes of Tables 7A-2, 7B-2, 8B, 9B, and 10B.

[0162] In some embodiments, a CoV RNAi agent comprises an antisense strand and a sense strand having the modified nucleotide sequences of any of the antisense strand/sense strand duplexes of Tables 7A-2, 7B-2, 8B, 9B, and 10B, and comprises an integrin targeting ligand.

[0163] In some embodiments, a CoV RNAi agent comprises, consists of, or consists essentially of any of the duplexes of Tables 7A-2, 7B-2, 8B, 9B, and 10B.

TABLE 7A-1
CoV RNAi agent Duplexes with Corresponding Sense and Antisense Strand
ID Numbers and Sequence ID numbers for the modified and unmodified
nucleotide sequences. (Shown without Linking Agents or Conjugates)

| | | AS | | | SS | SS |
|---|---|---|---|---|---|---|
| | | modified | AS | | modified | unmodified |
| | | SEQ ID | unmodified | | SEQ ID | SEQ ID |
| Duplex | AS ID | NO: | SEQ ID NO: | SS ID | NO: | NO: |
| AD08582 | AM11997-AS | 20 | 444 | AM11996-SS-NL | 165 | 519 |
| AD08583 | AM11999-AS | 21 | 445 | AM11998-SS-NL | 166 | 520 |
| AD08584 | AM12001-AS | 22 | 446 | AM12000-SS-NL | 167 | 521 |
| AD08585 | AM12003-AS | 23 | 447 | AM12002-SS-NL | 168 | 522 |
| AD08586 | AM12005-AS | 24 | 448 | AM12004-SS-NL | 169 | 523 |
| AD08587 | AM12007-AS | 25 | 449 | AM12006-SS-NL | 170 | 524 |
| AD08588 | AM12009-AS | 26 | 450 | AM12008-SS-NL | 171 | 525 |
| AD08589 | AM12011-AS | 27 | 451 | AM12010-SS-NL | 172 | 526 |
| AD08590 | AM12013-AS | 28 | 452 | AM12012-SS-NL | 173 | 527 |
| AD08591 | AM12015-AS | 29 | 453 | AM12014-SS-NL | 174 | 595 |
| AD08592 | AM12017-AS | 30 | 454 | AM12016-SS-NL | 175 | 529 |
| AD08593 | AM12019-AS | 31 | 455 | AM12018-SS-NL | 176 | 596 |
| AD08594 | AM12021-AS | 32 | 456 | AM12020-SS-NL | 177 | 531 |
| AD08595 | AM12023-AS | 33 | 457 | AM12022-SS-NL | 178 | 532 |
| AD08596 | AM12025-AS | 34 | 458 | AM12024-SS-NL | 179 | 533 |
| AD08597 | AM12027-AS | 35 | 459 | AM12026-SS-NL | 180 | 534 |
| AD08598 | AM12029-AS | 36 | 460 | AM12028-SS-NL | 181 | 597 |
| AD08599 | AM12031-AS | 37 | 461 | AM12030-SS-NL | 182 | 598 |
| AD08600 | AM12033-AS | 38 | 462 | AM12032-SS-NL | 183 | 537 |
| AD08601 | AM12035-AS | 39 | 463 | AM12034-SS-NL | 184 | 538 |
| AD08602 | AM12037-AS | 40 | 464 | AM12036-SS-NL | 185 | 539 |
| AD08603 | AM12039-AS | 41 | 465 | AM12038-SS-NL | 186 | 540 |
| AD08604 | AM12041-AS | 42 | 466 | AM12040-SS-NL | 187 | 541 |
| AD08605 | AM12041-AS | 42 | 466 | AM12042-SS-NL | 188 | 542 |
| AD08606 | AM12044-AS | 43 | 467 | AM12043-SS-NL | 189 | 543 |
| AD08607 | AM12046-AS | 44 | 468 | AM12045-SS-NL | 190 | 544 |
| AD08608 | AM12048-AS | 45 | 469 | AM12047-SS-NL | 191 | 545 |
| AD08609 | AM12050-AS | 46 | 470 | AM12049-SS-NL | 192 | 546 |
| AD08610 | AM12052-AS | 47 | 471 | AM12051-SS-NL | 193 | 547 |
| AD08611 | AM12054-AS | 48 | 472 | AM12053-SS-NL | 194 | 548 |
| AD08612 | AM12054-AS | 48 | 472 | AM12055-SS-NL | 195 | 599 |
| AD08613 | AM12057-AS | 49 | 473 | AM12056-SS-NL | 196 | 549 |
| AD08614 | AM12059-AS | 50 | 474 | AM12058-SS-NL | 197 | 550 |
| AD08615 | AM12059-AS | 50 | 474 | AM12060-SS-NL | 198 | 600 |
| AD08616 | AM12062-AS | 51 | 475 | AM12061-SS-NL | 199 | 551 |
| AD08617 | AM12064-AS | 52 | 476 | AM12063-SS-NL | 200 | 552 |
| AD08618 | AM12066-AS | 53 | 477 | AM12065-SS-NL | 201 | 553 |
| AD08619 | AM12068-AS | 54 | 478 | AM12067-SS-NL | 202 | 601 |
| AD08620 | AM12070-AS | 55 | 479 | AM12069-SS-NL | 203 | 602 |
| AD08857 | AM12469-AS | 56 | 480 | AM12468-SS-NL | 204 | 556 |
| AD08858 | AM12471-AS | 57 | 481 | AM12470-SS-NL | 205 | 557 |
| AD08859 | AM12473-AS | 58 | 482 | AM12472-SS-NL | 206 | 558 |
| AD08860 | AM12475-AS | 59 | 483 | AM12474-SS-NL | 207 | 603 |
| AD08861 | AM12477-AS | 60 | 484 | AM12476-SS-NL | 208 | 560 |
| AD08862 | AM12479-AS | 61 | 485 | AM12478-SS-NL | 209 | 561 |
| AD08863 | AM12481-AS | 62 | 486 | AM12480-SS-NL | 210 | 562 |
| AD08864 | AM12483-AS | 63 | 487 | AM12482-SS-NL | 211 | 563 |
| AD08865 | AM12485-AS | 64 | 488 | AM12484-SS-NL | 212 | 564 |
| AD08927 | AM12563-AS | 65 | 489 | AM12562-SS-NL | 213 | 604 |
| AD08928 | AM12565-AS | 66 | 490 | AM12564-SS-NL | 214 | 566 |
| AD08929 | AM12567-AS | 67 | 491 | AM12566-SS-NL | 215 | 567 |
| AD08930 | AM12569-AS | 68 | 492 | AM12568-SS-NL | 216 | 605 |
| AD08931 | AM12571-AS | 69 | 493 | AM12570-SS-NL | 217 | 569 |
| AD08932 | AM12573-AS | 70 | 494 | AM12572-SS-NL | 218 | 570 |
| AD08933 | AM12575-AS | 71 | 495 | AM12574-SS-NL | 219 | 571 |
| AD08934 | AM12577-AS | 72 | 496 | AM12576-SS-NL | 220 | 572 |
| AD08935 | AM12579-AS | 73 | 497 | AM12578-SS-NL | 221 | 573 |
| AD08936 | AM12581-AS | 74 | 498 | AM12580-SS-NL | 222 | 574 |
| AD08937 | AM12583-AS | 75 | 499 | AM12582-SS-NL | 223 | 575 |
| AD09274 | AM13120-AS | 76 | 500 | AM13119-SS-NL | 224 | 576 |
| AD09275 | AM13122-AS | 77 | 501 | AM13121-SS-NL | 225 | 577 |
| AD09276 | AM13124-AS | 78 | 502 | AM13123-SS-NL | 226 | 578 |
| AD09277 | AM13126-AS | 79 | 503 | AM13125-SS-NL | 227 | 579 |
| AD09278 | AM13128-AS | 80 | 504 | AM13127-SS-NL | 228 | 580 |
| AD09279 | AM12001-AS | 22 | 446 | AM13129-SS-NL | 229 | 521 |
| AD09280 | AM12469-AS | 56 | 480 | AM13130-SS-NL | 230 | 556 |
| AD09281 | AM12471-AS | 57 | 481 | AM13131-SS-NL | 231 | 557 |
| AD09282 | AM12005-AS | 24 | 448 | AM13132-SS-NL | 232 | 523 |
| AD09283 | AM12567-AS | 67 | 491 | AM13133-SS-NL | 233 | 567 |
| AD09284 | AM12569-AS | 68 | 492 | AM13134-SS-NL | 234 | 568 |
| AD09285 | AM12575-AS | 71 | 495 | AM13135-SS-NL | 235 | 571 |
| AD09286 | AM12579-AS | 73 | 497 | AM13136-SS-NL | 236 | 573 |
| AD09298 | AM12009-AS | 26 | 450 | AM13158-SS-NL | 237 | 525 |
| AD09299 | AM13160-AS | 81 | 505 | AM13159-SS-NL | 238 | 581 |
| AD09300 | AM12017-AS | 30 | 454 | AM13161-SS-NL | 239 | 529 |
| AD09301 | AM12475-AS | 59 | 483 | AM13162-SS-NL | 240 | 559 |
| AD09530 | AM13543-AS | 82 | 506 | AM13542-SS-NL | 241 | 582 |
| AD09531 | AM13545-AS | 83 | 507 | AM13544-SS-NL | 242 | 583 |
| AD09532 | AM13547-AS | 84 | 499 | AM13546-SS-NL | 243 | 575 |
| AD10293 | AM13120-AS | 76 | 500 | AM14660-SS-NL | 244 | 576 |
| AD10294 | AM14662-AS | 85 | 508 | AM14661-SS-NL | 245 | 584 |
| AD10295 | AM13122-AS | 77 | 501 | AM14663-SS-NL | 246 | 577 |
| AD10296 | AM13128-AS | 80 | 504 | AM14664-SS-NL | 247 | 580 |
| AD10297 | AM12001-AS | 22 | 446 | AM14665-SS-NL | 248 | 521 |
| AD10298 | AM14666-AS | 86 | 504 | AM13127-SS-NL | 228 | 580 |
| AD10299 | AM14667-AS | 87 | 446 | AM13129-SS-NL | 229 | 521 |
| AD10319 | AM14686-AS | 88 | 501 | AM13121-SS-NL | 225 | 577 |
| AD10320 | AM14687-AS | 89 | 492 | AM13134-SS-NL | 234 | 568 |
| AD10321 | AM14688-AS | 90 | 497 | AM13136-SS-NL | 236 | 573 |
| AD10322 | AM14689-AS | 91 | 495 | AM13135-SS-NL | 235 | 571 |
| AD10323 | AM14690-AS | 92 | 483 | AM13162-SS-NL | 240 | 559 |
| AD10424 | AM14859-AS | 93 | 491 | AM13133-SS-NL | 233 | 567 |
| AD10425 | AM14861-AS | 94 | 509 | AM14860-SS-NL | 250 | 585 |
| AD10536 | AM12475-AS | 59 | 483 | AM15013-SS-NL | 251 | 559 |
| AD10537 | AM12569-AS | 68 | 492 | AM15014-SS-NL | 252 | 568 |
| AD10538 | AM12579-AS | 73 | 497 | AM15015-SS-NL | 253 | 573 |
| AD10539 | AM12575-AS | 71 | 495 | AM15016-SS-NL | 254 | 571 |
| AD10540 | AM12567-AS | 67 | 491 | AM15017-SS-NL | 255 | 567 |
| AD10912 | AM14667-AS | 87 | 446 | AM14665-SS-NL | 248 | 521 |
| AD10913 | AM15563-AS | 95 | 446 | AM14665-SS-NL | 248 | 521 |
| AD10914 | AM15563-AS | 95 | 446 | AM15564-SS-NL | 256 | 521 |
| AD10915 | AM15565-AS | 96 | 446 | AM15564-SS-NL | 256 | 521 |
| AD10916 | AM15566-AS | 97 | 446 | AM15564-SS-NL | 256 | 521 |
| AD10917 | AM15568-AS | 98 | 510 | AM15567-SS-NL | 257 | 586 |
| AD10918 | AM15569-AS | 99 | 446 | AM15564-SS-NL | 256 | 521 |
| AD10919 | AM14690-AS | 92 | 483 | AM15013-SS-NL | 251 | 559 |
| AD10920 | AM15570-AS | 100 | 483 | AM15013-SS-NL | 251 | 559 |
| AD10921 | AM15570-AS | 100 | 483 | AM15571-SS-NL | 258 | 559 |
| AD10922 | AM15572-AS | 101 | 483 | AM15571-SS-NL | 258 | 559 |
| AD10923 | AM15574-AS | 102 | 511 | AM15573-SS-NL | 259 | 587 |
| AD10924 | AM15575-AS | 103 | 483 | AM15571-SS-NL | 258 | 559 |
| AD10925 | AM14859-AS | 93 | 491 | AM15017-SS-NL | 255 | 567 |
| AD10926 | AM15576-AS | 104 | 491 | AM15017-SS-NL | 255 | 567 |
| AD10927 | AM15576-AS | 104 | 491 | AM15577-SS-NL | 260 | 567 |
| AD10928 | AM15578-AS | 105 | 491 | AM15577-SS-NL | 260 | 567 |
| AD10929 | AM15579-AS | 106 | 491 | AM15577-SS-NL | 260 | 567 |
| AD10930 | AM15580-AS | 107 | 491 | AM15577-SS-NL | 260 | 567 |
| AD10931 | AM15582-AS | 108 | 509 | AM15581-SS-NL | 261 | 585 |
| AD11101 | AM14688-AS | 90 | 497 | AM15015-SS-NL | 253 | 573 |
| AD11102 | AM15795-AS | 109 | 497 | AM15015-SS-NL | 253 | 573 |
| AD11103 | AM15795-AS | 109 | 497 | AM15796-SS-NL | 262 | 573 |
| AD11104 | AM15797-AS | 110 | 497 | AM15796-SS-NL | 262 | 573 |
| AD11105 | AM15798-AS | 111 | 497 | AM15796-SS-NL | 262 | 573 |
| AD11106 | AM15799-AS | 112 | 497 | AM15796-SS-NL | 262 | 573 |
| AD11107 | AM15801-AS | 113 | 512 | AM15800-SS-NL | 263 | 588 |
| AD11108 | AM12015-AS | 29 | 453 | AM15802-SS-NL | 264 | 528 |
| AD11109 | AM15803-AS | 114 | 453 | AM15802-SS-NL | 264 | 528 |
| AD11110 | AM15804-AS | 115 | 453 | AM15802-SS-NL | 264 | 528 |
| AD11111 | AM15804-AS | 115 | 453 | AM15805-SS-NL | 265 | 528 |
| AD11112 | AM15807-AS | 116 | 513 | AM15806-SS-NL | 266 | 589 |
| AD11113 | AM15808-AS | 117 | 453 | AM15805-SS-NL | 265 | 528 |
| AD11114 | AM12017-AS | 30 | 454 | AM15809-SS-NL | 267 | 529 |
| AD11115 | AM15810-AS | 118 | 454 | AM15809-SS-NL | 267 | 529 |
| AD11116 | AM15812-AS | 119 | 454 | AM15811-SS-NL | 268 | 529 |
| AD11117 | AM14666-AS | 86 | 504 | AM14664-SS-NL | 247 | 580 |
| AD11118 | AM15813-AS | 120 | 504 | AM14664-SS-NL | 247 | 580 |
| AD11119 | AM15813-AS | 120 | 504 | AM15814-SS-NL | 269 | 580 |
| AD11120 | AM15815-AS | 121 | 504 | AM15814-SS-NL | 269 | 580 |
| AD11121 | AM15816-AS | 122 | 504 | AM15814-SS-NL | 269 | 580 |
| AD11122 | AM15818-AS | 123 | 506 | AM15817-SS-NL | 270 | 582 |
| AD11123 | AM15820-AS | 124 | 514 | AM15819-SS-NL | 271 | 590 |
| AD11124 | AM15822-AS | 125 | 515 | AM15821-SS-NL | 272 | 591 |
| AD11125 | AM15824-AS | 126 | 516 | AM15823-SS-NL | 273 | 592 |
| AD11126 | AM15826-AS | 127 | 503 | AM15825-SS-NL | 274 | 579 |
| AD11127 | AM15828-AS | 128 | 448 | AM15827-SS-NL | 275 | 523 |
| AD11128 | AM15830-AS | 129 | 517 | AM15829-SS-NL | 276 | 593 |
| AD11129 | AM15832-AS | 130 | 468 | AM15831-SS-NL | 277 | 544 |
| AD11610 | AM16516-AS | 131 | 446 | AM15564-SS-NL | 256 | 521 |
| AD11611 | AM16517-AS | 132 | 510 | AM15567-SS-NL | 257 | 586 |
| AD11612 | AM16519-AS | 133 | 518 | AM16518-SS-NL | 278 | 594 |
| AD11613 | AM15807-AS | 116 | 513 | AM16520-SS-NL | 279 | 589 |
| AD11614 | AM16521-AS | 134 | 453 | AM15802-SS-NL | 264 | 528 |
| AD11615 | AM16522-AS | 135 | 453 | AM15802-SS-NL | 264 | 528 |
| AD11616 | AM16523-AS | 136 | 513 | AM16520-SS-NL | 279 | 589 |
| AD11958 | AM16517-AS | 132 | 510 | AM16965-SS-NL | 280 | 586 |
| AD11959 | AM16966-AS | 137 | 510 | AM16965-SS-NL | 280 | 586 |
| AD11960 | AM15798-AS | 111 | 497 | AM16967-SS-NL | 281 | 573 |
| AD11961 | AM15813-AS | 120 | 504 | AM13127-SS-NL | 228 | 580 |
| AD11962 | AM15818-AS | 123 | 506 | AM16968-SS-NL | 282 | 582 |
| AD11963 | AM15570-AS | 100 | 483 | AM16969-SS-NL | 283 | 559 |
| AD11964 | AM15807-AS | 116 | 513 | AM16970-SS-NL | 284 | 589 |
| AD12040 | AM16966-AS | 137 | 510 | AM15567-SS-NL | 257 | 586 |

TABLE 7A-2
CoV RNAi agent Duplexes with Corresponding Sense and Antisense Strand
ID Numbers and Sequence ID numbers for the modified and unmodified
nucleotide sequences. (Shown without Linking Agents or Conjugates)

| | | AS | | | SS | SS |
|---|---|---|---|---|---|---|
| | | modified | AS | | modified | unmodified |
| | | SEQ ID | unmodified | | SEQ ID | SEQ ID |
| Duplex | AS ID | NO: | SEQ ID NO: | SS ID | NO: | NO: |
| AD13311 | AM18934-AS | 138 | 506 | AM15817-SS-NL | 270 | 582 |
| AD13312 | AM18935-AS | 139 | 506 | AM15817-SS-NL | 270 | 582 |
| AD13313 | AM18936-AS | 140 | 506 | AM15817-SS-NL | 270 | 582 |
| AD13314 | AM18935-AS | 139 | 506 | AM18937-SS-NL | 285 | 582 |
| AD13315 | AM18936-AS | 140 | 506 | AM18937-SS-NL | 285 | 582 |
| AD13316 | AM18938-AS | 141 | 506 | AM18937-SS-NL | 285 | 582 |
| AD13317 | AM18939-AS | 142 | 506 | AM18937-SS-NL | 285 | 582 |
| AD13318 | AM18940-AS | 143 | 506 | AM18937-SS-NL | 285 | 582 |
| AD13319 | AM18935-AS | 139 | 506 | AM18941-SS-NL | 286 | 582 |
| AD13320 | AM18936-AS | 140 | 506 | AM18941-SS-NL | 286 | 582 |
| AD13321 | AM18942-AS | 144 | 506 | AM15817-SS-NL | 270 | 582 |
| AD13331 | AM18961-AS | 145 | 506 | AM16968-SS-NL | 282 | 582 |
| AD13332 | AM18962-AS | 146 | 506 | AM16968-SS-NL | 282 | 582 |
| AD13333 | AM18963-AS | 147 | 506 | AM15817-SS-NL | 270 | 582 |
| AD13373 | AM19027-AS | 148 | 506 | AM15817-SS-NL | 270 | 582 |
| AD13374 | AM19028-AS | 149 | 506 | AM16968-SS-NL | 282 | 582 |
| AD13375 | AM19029-AS | 150 | 497 | AM13136-SS-NL | 236 | 573 |
| AD13376 | AM19030-AS | 151 | 497 | AM13136-SS-NL | 236 | 573 |
| AD13377 | AM19031-AS | 152 | 497 | AM13136-SS-NL | 236 | 573 |
| AD13483 | AM19029-AS | 150 | 497 | AM15015-SS-NL | 253 | 573 |
| AD13484 | AM19030-AS | 151 | 497 | AM15015-SS-NL | 253 | 573 |
| AD13485 | AM19031-AS | 152 | 497 | AM15015-SS-NL | 253 | 573 |
| AD13630 | AM18940-AS | 143 | 506 | AM15817-SS-NL | 270 | 582 |
| AD13631 | AM19330-AS | 153 | 506 | AM15817-SS-NL | 270 | 582 |
| AD13632 | AM19331-AS | 154 | 497 | AM15015-SS-NL | 253 | 573 |
| AD13633 | AM15801-AS | 113 | 512 | AM19332-SS-NL | 287 | 588 |
| AD13634 | AM19333-AS | 155 | 512 | AM19332-SS-NL | 287 | 588 |
| AD13714 | AM19413-AS | 156 | 506 | AM15817-SS-NL | 270 | 582 |
| AD13715 | AM19330-AS | 153 | 506 | AM18937-SS-NL | 285 | 582 |
| AD13716 | AM19413-AS | 156 | 506 | AM18937-SS-NL | 285 | 582 |
| AD13717 | AM18940-AS | 143 | 506 | AM18941-SS-NL | 286 | 582 |
| AD13718 | AM19330-AS | 153 | 506 | AM19414-SS-NL | 288 | 582 |
| AD13719 | AM19413-AS | 156 | 506 | AM19414-SS-NL | 288 | 582 |
| AD13720 | AM18936-AS | 140 | 506 | AM19414-SS-NL | 288 | 582 |
| AD13721 | AM18940-AS | 143 | 506 | AM19414-SS-NL | 288 | 582 |
| AD13722 | AM19415-AS | 157 | 497 | AM15015-SS-NL | 253 | 573 |
| AD13723 | AM19416-AS | 158 | 497 | AM15015-SS-NL | 253 | 573 |
| AD13724 | AM19417-AS | 159 | 497 | AM15015-SS-NL | 253 | 573 |
| AD13725 | AM19415-AS | 157 | 497 | AM15796-SS-NL | 262 | 573 |
| AD13726 | AM19331-AS | 154 | 497 | AM15796-SS-NL | 262 | 573 |
| AD13727 | AM19416-AS | 158 | 497 | AM15796-SS-NL | 262 | 573 |
| AD13728 | AM19417-AS | 159 | 497 | AM15796-SS-NL | 262 | 573 |
| AD13729 | AM15795-AS | 109 | 497 | AM19418-SS-NL | 289 | 573 |
| AD13730 | AM19415-AS | 157 | 497 | AM19418-SS-NL | 28 | 573 |
| AD13731 | AM19331-AS | 154 | 497 | AM19418-SS-NL | 289 | 573 |
| AD13732 | AM19416-AS | 158 | 497 | AM19418-SS-NL | 289 | 573 |
| AD13733 | AM19417-AS | 159 | 497 | AM19418-SS-NL | 289 | 573 |
| AD14036 | AM19803-AS | 160 | 506 | AM13542-SS-NL | 241 | 582 |
| AD14049 | AM19413-AS | 156 | 506 | AM18941-SS-NL | 286 | 582 |
| AD14050 | AM19816-AS | 161 | 497 | AM15015-SS-NL | 253 | 573 |
| AD14051 | AM19816-AS | 161 | 497 | AM15796-SS-NL | 262 | 573 |
| AD14052 | AM19816-AS | 161 | 497 | AM19418-SS-NL | 289 | 573 |
| AD14053 | AM19817-AS | 162 | 497 | AM15015-SS-NL | 253 | 573 |
| AD14584 | AM19803-AS | 160 | 506 | AM20438-SS-NL | 290 | 582 |
| AD14585 | AM18962-AS | 146 | 506 | AM20438-SS-NL | 290 | 582 |
| AD14586 | AM20439-AS | 163 | 506 | AM16968-SS-NL | 282 | 582 |
| AD14587 | AM18936-AS | 140 | 506 | AM16968-SS-NL | 282 | 582 |
| AD14668 | AM15795-AS | 109 | 497 | AM13136-SS-NL | 236 | 573 |
| AD14669 | AM19417-AS | 159 | 497 | AM13136-SS-NL | 236 | 573 |
| AD14670 | AM20532-AS | 164 | 497 | AM13136-SS-NL | 236 | 573 |
| AD14671 | AM19417-AS | 159 | 497 | AM16967-SS-NL | 281 | 573 |
| AD14672 | AM19416-AS | 158 | 497 | AM16967-SS-NL | 281 | 573 |

TABLE 7B-1
CoV RNAi agent Duplexes with Corresponding Sense and Antisense Strand ID Numbers
and Sequence ID numbers for the modified and unmodified nucleotide sequences.

| | | AS | AS | | SS | SS |
|---|---|---|---|---|---|---|
| | | modified | unmodified | | modified | unmodified |
| | | SEQ ID | SEQ ID | | SEQ ID | SEQ ID |
| Duplex | AS ID | NO: | NO: | SS ID | NO: | NO: |
| AD08582 | AM11997-AS | 20 | 444 | AM11996-SS | 291 | 519 |
| AD08583 | AM11999-AS | 21 | 445 | AM11998-SS | 292 | 520 |
| AD08584 | AM12001-AS | 22 | 446 | AM12000-SS | 293 | 521 |
| AD08585 | AM12003-AS | 23 | 447 | AM12002-SS | 294 | 522 |
| AD08586 | AM12005-AS | 24 | 448 | AM12004-SS | 295 | 523 |
| AD08587 | AM12007-AS | 25 | 449 | AM12006-SS | 296 | 524 |
| AD08588 | AM12009-AS | 26 | 450 | AM12008-SS | 297 | 525 |
| AD08589 | AM12011-AS | 27 | 451 | AM12010-SS | 298 | 526 |
| AD08590 | AM12013-AS | 28 | 452 | AM12012-SS | 299 | 527 |
| AD08591 | AM12015-AS | 29 | 453 | AM12014-SS | 300 | 595 |
| AD08592 | AM12017-AS | 30 | 454 | AM12016-SS | 301 | 529 |
| AD08593 | AM12019-AS | 31 | 455 | AM12018-SS | 302 | 596 |
| AD08594 | AM12021-AS | 32 | 456 | AM12020-SS | 303 | 531 |
| AD08595 | AM12023-AS | 33 | 457 | AM12022-SS | 304 | 532 |
| AD08596 | AM12025-AS | 34 | 458 | AM12024-SS | 305 | 533 |
| AD08597 | AM12027-AS | 35 | 459 | AM12026-SS | 306 | 534 |
| AD08598 | AM12029-AS | 36 | 460 | AM12028-SS | 307 | 597 |
| AD08599 | AM12031-AS | 37 | 461 | AM12030-SS | 308 | 598 |
| AD08600 | AM12033-AS | 38 | 462 | AM12032-SS | 309 | 537 |
| AD08601 | AM12035-AS | 39 | 463 | AM12034-SS | 310 | 538 |
| AD08602 | AM12037-AS | 40 | 464 | AM12036-SS | 311 | 539 |
| AD08603 | AM12039-AS | 41 | 465 | AM12038-SS | 312 | 540 |
| AD08604 | AM12041-AS | 42 | 466 | AM12040-SS | 313 | 541 |
| AD08605 | AM12041-AS | 42 | 466 | AM12042-SS | 314 | 542 |
| AD08606 | AM12044-AS | 43 | 467 | AM12043-SS | 315 | 543 |
| AD08607 | AM12046-AS | 44 | 468 | AM12045-SS | 316 | 544 |
| AD08608 | AM12048-AS | 45 | 469 | AM12047-SS | 317 | 545 |
| AD08609 | AM12050-AS | 46 | 470 | AM12049-SS | 318 | 546 |
| AD08610 | AM12052-AS | 47 | 471 | AM12051-SS | 319 | 547 |
| AD08611 | AM12054-AS | 48 | 472 | AM12053-SS | 320 | 548 |
| AD08612 | AM12054-AS | 48 | 472 | AM12055-SS | 321 | 599 |
| AD08613 | AM12057-AS | 49 | 473 | AM12056-SS | 322 | 549 |
| AD08614 | AM12059-AS | 50 | 474 | AM12058-SS | 323 | 550 |
| AD08615 | AM12059-AS | 50 | 474 | AM12060-SS | 324 | 600 |
| AD08616 | AM12062-AS | 51 | 475 | AM12061-SS | 325 | 551 |
| AD08617 | AM12064-AS | 52 | 476 | AM12063-SS | 326 | 552 |
| AD08618 | AM12066-AS | 53 | 477 | AM12065-SS | 327 | 553 |
| AD08619 | AM12068-AS | 54 | 478 | AM12067-SS | 328 | 601 |
| AD08620 | AM12070-AS | 55 | 479 | AM12069-SS | 329 | 602 |
| AD08857 | AM12469-AS | 56 | 480 | AM12468-SS | 330 | 556 |
| AD08858 | AM12471-AS | 57 | 481 | AM12470-SS | 331 | 557 |
| AD08859 | AM12473-AS | 58 | 482 | AM12472-SS | 332 | 558 |
| AD08860 | AM12475-AS | 59 | 483 | AM12474-SS | 333 | 603 |
| AD08861 | AM12477-AS | 60 | 484 | AM12476-SS | 334 | 560 |
| AD08862 | AM12479-AS | 61 | 485 | AM12478-SS | 335 | 561 |
| AD08863 | AM12481-AS | 62 | 486 | AM12480-SS | 336 | 562 |
| AD08864 | AM12483-AS | 63 | 487 | AM12482-SS | 337 | 563 |
| AD08865 | AM12485-AS | 64 | 488 | AM12484-SS | 338 | 564 |
| AD08927 | AM12563-AS | 65 | 489 | AM12562-SS | 339 | 604 |
| AD08928 | AM12565-AS | 66 | 490 | AM12564-SS | 340 | 566 |
| AD08929 | AM12567-AS | 67 | 491 | AM12566-SS | 341 | 567 |
| AD08930 | AM12569-AS | 68 | 492 | AM12568-SS | 342 | 605 |
| AD08931 | AM12571-AS | 69 | 493 | AM12570-SS | 343 | 569 |
| AD08932 | AM12573-AS | 70 | 494 | AM12572-SS | 344 | 570 |
| AD08933 | AM12575-AS | 71 | 495 | AM12574-SS | 345 | 571 |
| AD08934 | AM12577-AS | 72 | 496 | AM12576-SS | 346 | 572 |
| AD08935 | AM12579-AS | 73 | 497 | AM12578-SS | 347 | 573 |
| AD08936 | AM12581-AS | 74 | 498 | AM12580-SS | 348 | 574 |
| AD08937 | AM12583-AS | 75 | 499 | AM12582-SS | 349 | 575 |
| AD09274 | AM13120-AS | 76 | 500 | AM13119-SS | 350 | 576 |
| AD09275 | AM13122-AS | 77 | 501 | AM13121-SS | 351 | 577 |
| AD09276 | AM13124-AS | 78 | 502 | AM13123-SS | 352 | 578 |
| AD09277 | AM13126-AS | 79 | 503 | AM13125-SS | 353 | 579 |
| AD09278 | AM13128-AS | 80 | 504 | AM13127-SS | 354 | 580 |
| AD09279 | AM12001-AS | 22 | 446 | AM13129-SS | 355 | 521 |
| AD09280 | AM12469-AS | 56 | 480 | AM13130-SS | 356 | 556 |
| AD09281 | AM12471-AS | 57 | 481 | AM13131-SS | 357 | 557 |
| AD09282 | AM12005-AS | 24 | 448 | AM13132-SS | 358 | 523 |
| AD09283 | AM12567-AS | 67 | 491 | AM13133-SS | 359 | 567 |
| AD09284 | AM12569-AS | 68 | 492 | AM13134-SS | 360 | 568 |
| AD09285 | AM12575-AS | 71 | 495 | AM13135-SS | 361 | 571 |
| AD09286 | AM12579-AS | 73 | 497 | AM13136-SS | 362 | 573 |
| AD09298 | AM12009-AS | 26 | 450 | AM13158-SS | 363 | 525 |
| AD09299 | AM13160-AS | 81 | 505 | AM13159-SS | 364 | 581 |
| AD09300 | AM12017-AS | 30 | 454 | AM13161-SS | 365 | 529 |
| AD09301 | AM12475-AS | 59 | 483 | AM13162-SS | 366 | 559 |
| AD09530 | AM13543-AS | 82 | 506 | AM13542-SS | 367 | 582 |
| AD09531 | AM13545-AS | 83 | 507 | AM13544-SS | 368 | 583 |
| AD09532 | AM13547-AS | 84 | 499 | AM13546-SS | 369 | 575 |
| AD10293 | AM13120-AS | 76 | 500 | AM14660-SS | 370 | 576 |
| AD10294 | AM14662-AS | 85 | 508 | AM14661-SS | 371 | 584 |
| AD10295 | AM13122-AS | 77 | 501 | AM14663-SS | 372 | 577 |
| AD10296 | AM13128-AS | 80 | 504 | AM14664-SS | 373 | 580 |
| AD10297 | AM12001-AS | 22 | 446 | AM14665-SS | 374 | 521 |
| AD10298 | AM14666-AS | 86 | 504 | AM13127-SS | 354 | 580 |
| AD10299 | AM14667-AS | 87 | 446 | AM13129-SS | 355 | 521 |
| AD10319 | AM14686-AS | 88 | 501 | AM13121-SS | 351 | 577 |
| AD10320 | AM14687-AS | 89 | 492 | AM13134-SS | 360 | 568 |
| AD10321 | AM14688-AS | 90 | 497 | AM13136-SS | 362 | 573 |
| AD10322 | AM14689-AS | 91 | 495 | AM13135-SS | 361 | 571 |
| AD10323 | AM14690-AS | 92 | 483 | AM13162-SS | 366 | 559 |
| AD10424 | AM14859-AS | 93 | 491 | AM13133-SS | 359 | 567 |
| AD10425 | AM14861-AS | 94 | 509 | AM14860-SS | 376 | 585 |
| AD10536 | AM12475-AS | 59 | 483 | AM15013-SS | 377 | 559 |
| AD10537 | AM12569-AS | 68 | 492 | AM15014-SS | 378 | 568 |
| AD10538 | AM12579-AS | 73 | 497 | AM15015-SS | 379 | 573 |
| AD10539 | AM12575-AS | 71 | 495 | AM15016-SS | 380 | 571 |
| AD10540 | AM12567-AS | 67 | 491 | AM15017-SS | 381 | 567 |
| AD10912 | AM14667-AS | 87 | 446 | AM14665-SS | 374 | 521 |
| AD10913 | AM15563-AS | 95 | 446 | AM14665-SS | 374 | 521 |
| AD10914 | AM15563-AS | 95 | 446 | AM15564-SS | 382 | 521 |
| AD10915 | AM15565-AS | 96 | 446 | AM15564-SS | 382 | 521 |
| AD10916 | AM15566-AS | 97 | 446 | AM15564-SS | 382 | 521 |
| AD10917 | AM15568-AS | 98 | 510 | AM15567-SS | 383 | 586 |
| AD10918 | AM15569-AS | 99 | 446 | AM15564-SS | 382 | 521 |
| AD10919 | AM14690-AS | 92 | 483 | AM15013-SS | 377 | 559 |
| AD10920 | AM15570-AS | 100 | 483 | AM15013-SS | 377 | 559 |
| AD10921 | AM15570-AS | 100 | 483 | AM15571-SS | 384 | 559 |
| AD10922 | AM15572-AS | 101 | 483 | AM15571-SS | 384 | 559 |
| AD10923 | AM15574-AS | 102 | 511 | AM15573-SS | 385 | 587 |
| AD10924 | AM15575-AS | 103 | 483 | AM15571-SS | 384 | 559 |
| AD10925 | AM14859-AS | 93 | 491 | AM15017-SS | 381 | 567 |
| AD10926 | AM15576-AS | 104 | 491 | AM15017-SS | 381 | 567 |
| AD10927 | AM15576-AS | 104 | 491 | AM15577-SS | 386 | 567 |
| AD10928 | AM15578-AS | 105 | 491 | AM15577-SS | 386 | 567 |
| AD10929 | AM15579-AS | 106 | 491 | AM15577-SS | 386 | 567 |
| AD10930 | AM15580-AS | 107 | 491 | AM15577-SS | 386 | 567 |
| AD10931 | AM15582-AS | 108 | 509 | AM15581-SS | 387 | 585 |
| AD11101 | AM14688-AS | 90 | 497 | AM15015-SS | 379 | 573 |
| AD11102 | AM15795-AS | 109 | 497 | AM15015-SS | 379 | 573 |
| AD11103 | AM15795-AS | 109 | 497 | AM15796-SS | 388 | 573 |
| AD11104 | AM15797-AS | 110 | 497 | AM15796-SS | 388 | 573 |
| AD11105 | AM15798-AS | 111 | 497 | AM15796-SS | 388 | 573 |
| AD11106 | AM15799-AS | 112 | 497 | AM15796-SS | 388 | 573 |
| AD11107 | AM15801-AS | 113 | 512 | AM15800-SS | 389 | 588 |
| AD11108 | AM12015-AS | 29 | 453 | AM15802-SS | 390 | 528 |
| AD11109 | AM15803-AS | 114 | 453 | AM15802-SS | 390 | 528 |
| AD11110 | AM15804-AS | 115 | 453 | AM15802-SS | 390 | 528 |
| AD11111 | AM15804-AS | 115 | 453 | AM15805-SS | 391 | 528 |
| AD11112 | AM15807-AS | 116 | 513 | AM15806-SS | 392 | 589 |
| AD11113 | AM15808-AS | 117 | 453 | AM15805-SS | 391 | 528 |
| AD11114 | AM12017-AS | 30 | 454 | AM15809-SS | 393 | 529 |
| AD11115 | AM15810-AS | 118 | 454 | AM15809-SS | 393 | 529 |
| AD11116 | AM15812-AS | 119 | 454 | AM15811-SS | 394 | 529 |
| AD11117 | AM14666-AS | 86 | 504 | AM14664-SS | 373 | 580 |
| AD11118 | AM15813-AS | 120 | 504 | AM14664-SS | 373 | 580 |
| AD11119 | AM15813-AS | 120 | 504 | AM15814-SS | 395 | 580 |
| AD11120 | AM15815-AS | 121 | 504 | AM15814-SS | 395 | 580 |
| AD11121 | AM15816-AS | 122 | 504 | AM15814-SS | 395 | 580 |
| AD11122 | AM15818-AS | 123 | 506 | AM15817-SS | 396 | 582 |
| AD11123 | AM15820-AS | 124 | 514 | AM15819-SS | 397 | 590 |
| AD11124 | AM15822-AS | 125 | 515 | AM15821-SS | 398 | 591 |
| AD11125 | AM15824-AS | 126 | 516 | AM15823-SS | 399 | 592 |
| AD11126 | AM15826-AS | 127 | 503 | AM15825-SS | 400 | 579 |
| AD11127 | AM15828-AS | 128 | 448 | AM15827-SS | 401 | 523 |
| AD11128 | AM15830-AS | 129 | 517 | AM15829-SS | 402 | 593 |
| AD11129 | AM15832-AS | 130 | 468 | AM15831-SS | 403 | 544 |
| AD11610 | AM16516-AS | 131 | 446 | AM15564-SS | 382 | 521 |
| AD11611 | AM16517-AS | 132 | 510 | AM15567-SS | 383 | 586 |
| AD11612 | AM16519-AS | 133 | 518 | AM16518-SS | 404 | 594 |
| AD11613 | AM15807-AS | 116 | 513 | AM16520-SS | 405 | 589 |
| AD11614 | AM16521-AS | 134 | 453 | AM15802-SS | 390 | 528 |
| AD11615 | AM16522-AS | 135 | 453 | AM15802-SS | 390 | 528 |
| AD11616 | AM16523-AS | 136 | 513 | AM16520-SS | 405 | 589 |
| AD11958 | AM16517-AS | 132 | 510 | AM16965-SS | 406 | 586 |
| AD11959 | AM16966-AS | 137 | 510 | AM16965-SS | 406 | 586 |
| AD11960 | AM15798-AS | 111 | 497 | AM16967-SS | 407 | 573 |
| AD11961 | AM15813-AS | 120 | 504 | AM13127-SS | 354 | 580 |
| AD11962 | AM15818-AS | 123 | 506 | AM16968-SS | 408 | 582 |
| AD11963 | AM15570-AS | 100 | 483 | AM16969-SS | 409 | 559 |
| AD11964 | AM15807-AS | 116 | 513 | AM16970-SS | 410 | 589 |
| AD12040 | AM16966-AS | 137 | 510 | AM15567-SS | 383 | 586 |

TABLE 7B-2
CoV RNAi agent Duplexes with Corresponding Sense and Antisense Strand ID Numbers
and Sequence ID numbers for the modified and unmodified nucleotide sequences.

| | | AS | AS | | SS | SS |
|---|---|---|---|---|---|---|
| | | modified | unmodified | | modified | unmodified |
| | | SEQ ID | SEQ ID | | SEQ ID | SEQ ID |
| Duplex | AS ID | NO: | NO: | SS ID | NO: | NO: |
| AD13311 | AM18934-AS | 138 | 506 | AM15817-SS | 396 | 582 |
| AD13312 | AM18935-AS | 139 | 506 | AM15817-SS | 396 | 582 |
| AD13313 | AM18936-AS | 140 | 506 | AM15817-SS | 396 | 582 |
| AD13314 | AM18935-AS | 139 | 506 | AM18937-SS | 411 | 582 |
| AD13315 | AM18936-AS | 140 | 506 | AM18937-SS | 411 | 582 |
| AD13316 | AM18938-AS | 141 | 506 | AM18937-SS | 411 | 582 |
| AD13317 | AM18939-AS | 142 | 506 | AM18937-SS | 411 | 582 |
| AD13318 | AM18940-AS | 143 | 506 | AM18937-SS | 411 | 582 |
| AD13319 | AM18935-AS | 139 | 506 | AM18941-SS | 412 | 582 |
| AD13320 | AM18936-AS | 140 | 506 | AM18941-SS | 412 | 582 |
| AD13321 | AM18942-AS | 144 | 506 | AM15817-SS | 396 | 582 |
| AD13331 | AM18961-AS | 145 | 506 | AM16968-SS | 408 | 582 |
| AD13332 | AM18962-AS | 146 | 506 | AM16968-SS | 405 | 582 |
| AD13333 | AM18963-AS | 147 | 506 | AM15817-SS | 396 | 582 |
| AD13373 | AM19027-AS | 148 | 506 | AM15817-SS | 396 | 582 |
| AD13374 | AM19028-AS | 149 | 506 | AM16968-SS | 408 | 582 |
| AD13375 | AM19029-AS | 150 | 497 | AM13136-SS | 362 | 573 |
| AD13376 | AM19030-AS | 151 | 497 | AM13136-SS | 362 | 573 |
| AD13377 | AM19031-AS | 152 | 497 | AM13136-SS | 362 | 573 |
| AD13483 | AM19029-AS | 150 | 497 | AM15015-SS | 379 | 573 |
| AD13484 | AM19030-AS | 151 | 497 | AM15015-SS | 379 | 573 |
| AD13485 | AM19031-AS | 152 | 497 | AM15015-SS | 379 | 573 |
| AD13630 | AM18940-AS | 143 | 506 | AM15817-SS | 396 | 582 |
| AD13631 | AM19330-AS | 153 | 506 | AM15817-SS | 396 | 582 |
| AD13632 | AM19331-AS | 154 | 497 | AM15015-SS | 379 | 573 |
| AD13633 | AM15801-AS | 113 | 512 | AM19332-SS | 413 | 588 |
| AD13634 | AM19333-AS | 155 | 512 | AM19332-SS | 413 | 588 |
| AD13714 | AM19413-AS | 156 | 506 | AM15817-SS | 396 | 582 |
| AD13715 | AM19330-AS | 153 | 506 | AM18937-SS | 411 | 582 |
| AD13716 | AM19413-AS | 156 | 506 | AM18937-SS | 411 | 582 |
| AD13717 | AM18940-AS | 143 | 506 | AM18941-SS | 412 | 582 |
| AD13718 | AM19330-AS | 153 | 506 | AM19414-SS | 414 | 582 |
| AD13719 | AM19413-AS | 156 | 506 | AM19414-SS | 414 | 582 |
| AD13720 | AM18936-AS | 140 | 506 | AM19414-SS | 414 | 582 |
| AD13721 | AM18940-AS | 143 | 506 | AM19414-SS | 414 | 582 |
| AD13722 | AM19415-AS | 157 | 497 | AM15015-SS | 379 | 573 |
| AD13723 | AM19416-AS | 158 | 497 | AM15015-SS | 379 | 573 |
| AD13724 | AM19417-AS | 159 | 497 | AM15015-SS | 379 | 573 |
| AD13725 | AM19415-AS | 157 | 497 | AM15796-SS | 388 | 573 |
| AD13726 | AM19331-AS | 154 | 497 | AM15796-SS | 388 | 573 |
| AD13727 | AM19416-AS | 158 | 497 | AM15796-SS | 388 | 573 |
| AD13728 | AM19417-AS | 159 | 497 | AM15796-SS | 388 | 573 |
| AD13729 | AM15795-AS | 109 | 497 | AM19418-SS | 415 | 573 |
| AD13730 | AM19415-AS | 157 | 497 | AM19418-SS | 415 | 573 |
| AD13731 | AM19331-AS | 154 | 497 | AM19418-SS | 415 | 573 |
| AD13732 | AM19416-AS | 158 | 497 | AM19418-SS | 415 | 573 |
| AD13733 | AM19417-AS | 159 | 497 | AM19418-SS | 415 | 573 |
| AD14036 | AM19803-AS | 160 | 506 | AM13542-SS | 367 | 582 |
| AD14049 | AM19413-AS | 156 | 506 | AM18941-SS | 412 | 582 |
| AD14050 | AM19816-AS | 161 | 497 | AM15015-SS | 379 | 573 |
| AD14051 | AM19816-AS | 161 | 497 | AM15796-SS | 388 | 573 |
| AD14052 | AM19816-AS | 161 | 497 | AM19418-SS | 415 | 573 |
| AD14053 | AM19817-AS | 162 | 497 | AM15015-SS | 379 | 573 |
| AD14584 | AM19803-AS | 160 | 506 | AM20438-SS | 416 | 582 |
| AD14585 | AM18962-AS | 146 | 506 | AM20438-SS | 416 | 582 |
| AD14586 | AM20439-AS | 163 | 506 | AM16968-SS | 408 | 582 |
| AD14587 | AM18936-AS | 140 | 506 | AM16968-SS | 408 | 582 |
| AD14668 | AM15795-AS | 109 | 497 | AM13136-SS | 362 | 573 |
| AD14669 | AM19417-AS | 159 | 497 | AM13136-SS | 362 | 573 |
| AD14670 | AM20532-AS | 164 | 497 | AM13136-SS | 362 | 573 |
| AD14671 | AM19417-AS | 159 | 497 | AM16967-SS | 407 | 573 |
| AD14672 | AM19416-AS | 158 | 497 | AM16967-SS | 407 | 573 |

TABLE 8A
CoV RNAi agent Duplexes with Corresponding Sense and Antisense Strand
ID Numbers and Sequence ID numbers for the modified and unmodified
nucleotide sequences. (Shown with Targeting Ligand Conjugates)

| | | AS | | | SS | |
|---|---|---|---|---|---|---|
| | | modified | AS | | modified | SS |
| | | SEQ ID | unmodified | | SEQ ID | unmodified |
| Duplex | AS ID | NO: | SEQ ID NO: | SS ID | NO: | SEQ ID NO: |
| AC001334 | AM13120-AS | 76 | 500 | CS001679 | 417 | 576 |
| AC001335 | AM13122-AS | 77 | 501 | CS001681 | 418 | 577 |
| AC001336 | AM13124-AS | 78 | 502 | CS001683 | 419 | 578 |
| AC001337 | AM13126-AS | 79 | 503 | CS001685 | 420 | 579 |
| AC001338 | AM13128-AS | 80 | 504 | CS001687 | 421 | 580 |
| AC001339 | AM12001-AS | 22 | 446 | CS001689 | 422 | 521 |
| AC001340 | AM12469-AS | 56 | 480 | CS001691 | 423 | 556 |
| AC001341 | AM12471-AS | 57 | 481 | CS001693 | 424 | 557 |
| AC001342 | AM12005-AS | 24 | 448 | CS001695 | 425 | 523 |
| AC001343 | AM12567-AS | 67 | 491 | CS001697 | 426 | 567 |
| AC001344 | AM12569-AS | 68 | 492 | CS001699 | 427 | 568 |
| AC001345 | AM12575-AS | 71 | 495 | CS001701 | 428 | 571 |
| AC001346 | AM12579-AS | 73 | 497 | CS001703 | 429 | 573 |
| AC001347 | AM12009-AS | 26 | 450 | CS001705 | 430 | 525 |
| AC001348 | AM13160-AS | 81 | 505 | CS001707 | 431 | 581 |
| AC001349 | AM12017-AS | 30 | 454 | CS001709 | 432 | 529 |
| AC001350 | AM12475-AS | 59 | 483 | CS001711 | 433 | 559 |
| AC001474 | AM13543-AS | 82 | 506 | CS001891 | 434 | 582 |
| AC001475 | AM13545-AS | 83 | 507 | CS001893 | 435 | 583 |
| AC001476 | AM13547-AS | 84 | 499 | CS001895 | 436 | 585 |
| AC001887 | AM14666-AS | 86 | 504 | CS001687 | 421 | 580 |
| AC001888 | AM14667-AS | 87 | 446 | CS001689 | 422 | 521 |
| AC001922 | AM14686-AS | 88 | 501 | CS001681 | 418 | 577 |
| AC001923 | AM14687-AS | 89 | 492 | CS001699 | 427 | 568 |
| AC001924 | AM14688-AS | 90 | 497 | CS001703 | 429 | 573 |
| AC001925 | AM14689-AS | 91 | 495 | CS001701 | 428 | 571 |
| AC001926 | AM14690-AS | 92 | 483 | CS001711 | 433 | 559 |
| AC001961 | AM14859-AS | 93 | 491 | CS001697 | 426 | 567 |
| AC001962 | AM14861-AS | 94 | 509 | CS002495 | 437 | 585 |
| AC002617 | AM16517-AS | 132 | 510 | CS003334 | 438 | 586 |
| AC002618 | AM16966-AS | 137 | 510 | CS003334 | 438 | 586 |
| AC002619 | AM15798-AS | 111 | 497 | CS003337 | 439 | 573 |
| AC002620 | AM15813-AS | 120 | 504 | CS001687 | 421 | 580 |
| AC002621 | AM15818-AS | 123 | 506 | CS003340 | 440 | 582 |
| AC002622 | AM15570-AS | 100 | 483 | CS003342 | 441 | 559 |
| AC002623 | AM15807-AS | 116 | 513 | CS003344 | 442 | 589 |

TABLE 8B
Optimized CoV RNAi agent Duplexes with Corresponding Sense and Antisense
Strand ID Numbers and Sequence ID numbers for the modified and unmodified
nucleotide sequences. (Shown with Targeting Ligand Conjugates)

| | | AS | | | SS | |
|---|---|---|---|---|---|---|
| | | modified | AS | | modified | SS |
| | | SEQ ID | unmodified | | SEQ ID | unmodified |
| Duplex | AS ID | NO: | SEQ ID NO: | SS ID | NO: | SEQ ID NO: |
| AC003012 | AM18961-AS | 145 | 506 | CS003340 | 440 | 582 |
| AC003013 | AM18962-AS | 146 | 506 | CS003340 | 440 | 582 |
| AC003014 | AM19028-AS | 149 | 506 | CS003340 | 440 | 582 |
| AC003015 | AM19029-AS | 150 | 497 | CS001703 | 429 | 573 |
| AC003016 | AM19030-AS | 151 | 497 | CS001703 | 429 | 573 |
| AC003017 | AM19031-AS | 152 | 497 | CS001703 | 429 | 573 |
| AC003273 | AM19803-AS | 160 | 506 | CS001891 | 434 | 582 |
| AC003505 | AM19803-AS | 160 | 506 | CS004352 | 443 | 582 |
| AC003506 | AM18962-AS | 146 | 506 | CS004352 | 443 | 582 |
| AC003507 | AM20439-AS | 163 | 506 | CS003340 | 440 | 582 |
| AC003508 | AM18936-AS | 140 | 506 | CS003340 | 440 | 582 |
| AC003526 | AM15795-AS | 109 | 497 | CS001703 | 429 | 573 |
| AC003527 | AM19417-AS | 159 | 497 | CS001703 | 429 | 573 |
| AC003528 | AM20532-AS | 164 | 497 | CS001703 | 429 | 573 |
| AC003529 | AM19417-AS | 159 | 497 | CS003337 | 439 | 573 |
| AC003530 | AM19416-AS | 158 | 497 | CS003337 | 439 | 573 |

TABLE 9A
Conjugate Duplex ID Numbers Referencing Position
Targeted On SARS-CoV-2 Viral Genome

| | | | | Targeted |
|---|---|---|---|---|
| | | | | SARS-CoV-2 |
| | | | Duplex ID | Viral Genome |
| Conjugate | | | (Pre- | Position (Of |
| Duplex ID | AS ID | SS ID | Conjugation) | SEQ ID NO: 1) |
| AC001334 | AM13120-AS | CS001679 | AD09274 | 3652 |
| AC001335 | AM13122-AS | CS001681 | AD09275 | 8140 |
| AC001336 | AM13124-AS | CS001683 | AD09276 | 4038 |
| AC001337 | AM13126-AS | CS001685 | AD09277 | 8039 |
| AC001338 | AM13128-AS | CS001687 | AD09278 | 4917 |
| AC001339 | AM12001-AS | CS001689 | AD09279 | 6412 |
| AC001340 | AM12469-AS | CS001691 | AD09280 | 10931 |
| AC001341 | AM12471-AS | CS001693 | AD09281 | 11434 |
| AC001342 | AM12005-AS | CS001695 | AD09282 | 12284 |
| AC001343 | AM12567-AS | CS001697 | AD09283 | 28587 |
| AC001344 | AM12569-AS | CS001699 | AD09284 | 28590 |
| AC001345 | AM12575-AS | CS001701 | AD09285 | 29064 |
| AC001346 | AM12579-AS | CS001703 | AD09286 | 29150 |
| AC001347 | AM12009-AS | CS001705 | AD09298 | 13766 |
| AC001348 | AM13160-AS | CS001707 | AD09299 | 14050 |
| AC001349 | AM12017-AS | CS001709 | AD09300 | 14511 |
| AC001350 | AM12475-AS | CS001711 | AD09301 | 15886 |
| AC001474 | AM13543-AS | CS001891 | AD09530 | 4156 |
| AC001475 | AM13545-AS | CS001893 | AD09531 | 4926 |
| AC001476 | AM13547-AS | CS001895 | AD09532 | 29329 |
| AC001887 | AM14666-AS | CS001687 | AD10298 | 4917 |
| AC001888 | AM14667-AS | CS001689 | AD10299 | 6412 |
| AC001922 | AM14686-AS | CS001681 | AD10319 | 8140 |
| AC001923 | AM14687-AS | CS001699 | AD10320 | 28590 |
| AC001924 | AM14688-AS | CS001703 | AD10321 | 29150 |
| AC001925 | AM14689-AS | CS001701 | AD10322 | 29064 |
| AC001926 | AM14690-AS | CS001711 | AD10323 | 15886 |
| AC001961 | AM14859-AS | CS001697 | AD10424 | 28587 |
| AC001962 | AM14861-AS | CS002495 | AD10425 | 28587 |
| AC002617 | AM16517-AS | CS003334 | AD11958 | 6412 |
| AC002618 | AM16966-AS | CS003334 | AD11959 | 6412 |
| AC002619 | AM15798-AS | CS003337 | AD11960 | 29150 |
| AC002620 | AM15813-AS | CS001687 | AD11961 | 4917 |
| AC002621 | AM15818-AS | CS003340 | AD11962 | 4156 |
| AC002622 | AM15570-AS | CS003342 | AD11963 | 15886 |
| AC002623 | AM15807-AS | CS003344 | AD11964 | 14503 |

TABLE 9B
Optimized Conjugate Duplex ID Numbers Referencing
Position Targeted On SARS-CoV-2 Viral Genome

| | | | | Targeted |
|---|---|---|---|---|
| | | | | SARS-CoV-2 |
| | | | Duplex ID | Viral Genome |
| Conjugate | | | (Pre- | Position (Of |
| Duplex ID | AS ID | SS ID | Conjugation) | SEQ ID NO: 1) |
| AC003012 | AM18961-AS | CS003340 | AD13331 | 4156 |
| AC003013 | AM18962-AS | CS003340 | AD13332 | 4156 |
| AC003014 | AM19028-AS | CS003340 | AD13374 | 4156 |
| AC003015 | AM19029-AS | CS001703 | AD13375 | 29150 |
| AC003016 | AM19030-AS | CS001703 | AD13376 | 29150 |
| AC003017 | AM19031-AS | CS001703 | AD13377 | 29150 |
| AC003273 | AM19803-AS | CS001891 | AD14036 | 4156 |
| AC003505 | AM19803-AS | CS004352 | AD14584 | 4156 |
| AC003506 | AM18962-AS | CS004352 | AD14585 | 4156 |
| AC003507 | AM20439-AS | CS003340 | AD14586 | 4156 |
| AC003508 | AM18936-AS | CS003340 | AD14587 | 4156 |
| AC003526 | AM15795-AS | CS001703 | AD14668 | 29150 |
| AC003527 | AM19417-AS | CS001703 | AD14669 | 29150 |
| AC003528 | AM20532-AS | CS001703 | AD14670 | 29150 |
| AC003529 | AM19417-AS | CS003337 | AD14671 | 29150 |
| AC003530 | AM19416-AS | CS003337 | AD14672 | 29150 |

TABLE 10A
Conjugate ID Numbers With Chemically Modified Antisense and Sense Strands
(including Linkers and Conjugates)

| | | SEQ | | SEQ |
|---|---|---|---|---|
| AC ID | Sense Strand (Fully Modified with | ID | | ID |
| Number | Conjugated Targeting Ligand) (5′ → 3′) | NO: | Antisense Strand (5′ → 3′) | NO: |
| AC001334 | Tri-SM6.1-avb6-TA14-gscuucuuaAfGfAfgugcuuaugas | 417 | usCfsasUfaAfgCfaCfuCfuUfaAfgAfaGfsc | 76 |
| | (invAb) | | | |
| AC001335 | Tri-SM6.1-avb6-TA14-csuuagacaAfUfGfucuuaucuaas | 418 | usUfsasGfaUfaAfgAfcAfuUfgUfcUfaAfsg | 77 |
| | (invAb) | | | |
| AC001336 | Tri-SM6.1-avb6-TA14-gscauuaauGfGfCfaaucuucauas | 419 | usAfsusGfaAfgAfuUfgCfcAfuUfaAfuGfsc | 78 |
| | (invAb) | | | |
| AC001337 | Tri-SM6.1-avb6-TA14-gsaugcuuaCfGfUfuaauacguuus | 420 | asAfsasCfgUfaUfuAfaCfgUfaAfgCfaUfsc | 79 |
| | (invAb) | | | |
| AC001338 | Tri-SM6.1-avb6-TA14-gscaccuuuGfAfCfaaucuuaagas | 421 | usCfsusUfaAfgAfuUfgUfcAfaAfgGfuGfsc | 80 |
| | (invAb) | | | |
| AC001339 | Tri-SM6.1-avb6-TA14-gsgaaguagUfGfGfaaaauccuaas | 422 | usUfsasGfgAfuUfuUfcCfaCfuAfcUfuCfsc | 22 |
| | (invAb) | | | |
| AC001340 | Tri-SM6.1-avb6-TA14-cscuuuugaUfGfUfuguuagacaas | 423 | usUfsgsUfcUfaAfcAfaCfaUfcAfaAfaGfsg | 56 |
| | (invAb) | | | |
| AC001341 | Tri-SM6.1-avb6-TA14-usgguaaugCfUfUfuagaucaagas | 424 | usCfsusUfgAfuCfuAfaAfgCfaUfuAfcCfsa | 57 |
| | (invAb) | | | |
| AC001342 | Tri-SM6.1-avb6-TA14-csaagcuauGfAfCfccaaauguaus | 425 | asUfsasCfaUfuUfgGfgUfcAfuAfgCfuUfsg | 24 |
| | (invAb) | | | |
| AC001343 | Tri-SM6.1-avb6-TA14-gsuccaagaUfGfGfuauuucuacus | 426 | asGfsusAfgAfaAfuAfcCfaUfcUfuGfgAfsc | 67 |
| | (invAb) | | | |
| AC001344 | Tri-SM6.1-avb6-TA14-csaagauggUfAfUfuucuacuacas | 427 | usGfsusAfgUfaGfaAfaUfaCfcAfuCfuUfsg | 68 |
| | (invAb) | | | |
| AC001345 | Tri-SM6.1-avb6-TA14-cscacuaaaGfCfAfuacaauguaas | 428 | usUfsasCfaUfuGfuAfuGfcUfuUfaGfuGfsg | 71 |
| | (invAb) | | | |
| AC001346 | Tri-SM6.1-avb6-TA14-gsgacaaggAfAfCfugauuacaaas | 429 | usUfsusGfuAfaUfcAfgUfuCfcUfuGfuCfsc | 73 |
| | (invAb) | | | |
| AC001347 | Tri-SM6.1-avb6-TA14-gscaugguaCfCfAfcauauaucaas | 430 | usUfsgsAfuAfuAfuGfuGfgUfaCfcAfuGfsc | 26 |
| | (invAb) | | | |
| AC001348 | Tri-SM6.1-avb6-TA14-gsuacugacAfUfUfagauaaucaas | 431 | usUfsgsAfuUfaUfcUfaAfuGfuCfaGfuAfsc | 81 |
| | (invAb) | | | |
| AC001349 | Tri-SM6.1-avb6-TA14-gsgauguaaAfCfUfuacauagcuas | 432 | usAfsgsCfuAfuGfuAfaGfuUfuAfcAfuCfsc | 30 |
| | (invAb) | | | |
| AC001350 | Tri-SM6.1-avb6-TA14-csauacaauGfCfUfaguuaaacaas | 433 | usUfsgsUfuUfaAfcUfaGfcAfuUfgUfaUfsg | 59 |
| | (invAb) | | | |
| AC001474 | Tri-SM6.1-avb6-TA14-usgcuguggUfuAfuAfccuacuaas | 434 | usUfsasguagguauAfaCfcAfcagcsa | 82 |
| | (invAb) | | | |
| AC001475 | Tri-SM6.1-avb6-TA14-gscaaucUfuAfaGfacacuucuuus | 435 | asAfsasGfaagugucUfuAfaGfauugsc | 83 |
| | (invAb) | | | |
| AC001476 | Tri-SM6.1-avb6-TA14-gscugaaUfaAfgCfauauugacias | 436 | usCfsgsucaaUfAfugCfuUfaUfucagsc | 84 |
| | (invAb) | | | |
| AC001887 | Tri-SM6.1-avb6-TA14-gscaccuuuGfAfCfaaucuuaagas | 421 | cPrpusCfsusUfaAfgAfuUfgUfcAfaAfgGfu | 86 |
| | (invAb) | | Gfsc | |
| AC001888 | Tri-SM6.1-avb6-TA14-gsgaaguagUfGfGfaaaauccuaas | 422 | cPrpusUfsasGfgAfuUfuUfcCfaCfuAfcUfu | 87 |
| | (invAb) | | Cfsc | |
| AC001922 | Tri-SM6.1-avb6-TA14-csuuagacaAfUfGfucuuaucuaas | 418 | cPrpusUfsasGfaUfaAfgAfcAfuUfgUfcUfa | 88 |
| | (invAb) | | Afsg | |
| AC001923 | Tri-SM6.1-avb6-TA14-csaagauggUfAfUfuucuacuacas | 427 | cPrpusGfsusAfgUfaGfaAfaUfaCfcAfuCfu | 89 |
| | (invAb) | | Ufsg | |
| AC001924 | Tri-SM6.1-avb6-TA14-gsgacaaggAfAfCfugauuacaaas | 429 | cPrpusUfsusGfuAfaUfcAfgUfuCfcUfuGfu | 90 |
| | (invAb) | | Cfsc | |
| AC001925 | Tri-SM6.1-avb6-TA14-cscacuaaaGfCfAfuacaauguaas | 428 | cPrpusUfsasCfaUfuGfuAfuGfcUfuUfaGfu | 91 |
| | (invAb) | | Gfsg | |
| AC001926 | Tri-SM6.1-avb6-TA14-csauacaauGfCfUfaguuaaacaas | 433 | cPrpusUfsgsUfuUfaAfcUfaGfcAfuUfgUfa | 92 |
| | (invAb) | | Ufsg | |
| AC001961 | Tri-SM6.1-avb6-TA14-gsuccaagaUfGfGfuauuucuacus | 426 | cPrpasGfsusAfgAfaAfuAfcCfaUfcUfuGfg | 93 |
| | (invAb) | | Afsc | |
| AC001962 | Tri-SM6.1-avb6-TA14-gsuccaagaUfGfGfuauuucuacas | 437 | cPrpusGfsusAfgAfaAfuAfcCfaUfcUfuGfg | 94 |
| | (invAb) | | Afsc | |
| AC002617 | Tri-SM6.1-avb6-TA14-csgaaguagUfgGfaAfaauccuaas | 438 | cPrpuUfaGfgauuuucCfaCfuAfcuuscsg | 132 |
| | (invAb) | | | |
| AC002618 | Tri-SM6.1-avb6-TA14-csgaaguagUfgGfaAfaauccuaas | 438 | cPrpusUfsaGfgauuuucCfaCfuAfcuuscsg | 137 |
| | (invAb) | | | |
| AC002619 | Tri-SM6.1-avb6-TA14-gsgacaaggAfaCfuGfauuacaaas | 439 | cPrpusUfsuGfuaaucagUfuCfcUfuguscsc | 111 |
| | (invAb) | | | |
| AC002620 | Tri-SM6.1-avb6-TA14-gscaccuuuGfAfCfaaucuuaagas | 421 | cPrpusCfsusUfaagauugUfcAfaAfggugsc | 120 |
| | (invAb) | | | |
| AC002621 | Tri-SM6.1-avb6-TA14-usgcuguggUfUfAfuaccuacuaas | 440 | cPrpusUfsasGfuAfgGfuAfuAfaCfcAfcAfg | 123 |
| | (invAb) | | Cfsa | |
| AC002622 | Tri-SM6.1-avb6-TA14-csauacaauGfcUfaGfuuaaacaas | 441 | cPrpusUfsgUfuuaacuaGfcAfuUfguasusg | 100 |
| | (invAb) | | | |
| AC002623 | Tri-SM6.1-avb6-TA14-csguaaucaGfgAfuGfuaaacuuas | 442 | cPrpusAfsasGfuuuacauCfcUfgAfuuacsg | 116 |
| | (invAb) | | | |

TABLE 10B
Conjugate ID Numbers With Chemically Modified Antisense and Sense Strands
(including Linkers and Conjugates)

| | | SEQ | | SEQ |
|---|---|---|---|---|
| AC ID | Sense Strand (Fully Modified with | ID | | ID |
| Number | Conjugated Targeting Ligand) (5′ → 3′) | NO: | Antisense Strand (5′ → 3′) | NO: |
| AC003012 | Tri-SM6.1-avb6-TA14-usgcuguggUfUfAfuaccuacuaas | 440 | cPrpusUfsasGfuAfgguauAfaCfcAfcAfgcsa | 145 |
| | (invAb) | | | |
| AC003013 | Tri-SM6.1-avb6-TA14-usgcuguggUfUfAfuaccuacuaas | 440 | cPrpusUfsasguaGfguauAfaCfcAfcagcsa | 146 |
| | (invAb) | | | |
| AC003014 | Tri-SM6.1-avb6-TA14-usgcuguggUfUfAfuaccuacuaas | 440 | cPrpusUfsasguAfgguauAfaCfcAfcagcsa | 149 |
| | (invAb) | | | |
| AC003015 | Tri-SM6.1-avb6-TA14-gsgacaaggAfAfCfugauuacaaas | 429 | cPrpusUfsusGfuAfaucagUfuCfcUfuGfucsc | 150 |
| | (invAb) | | | |
| AC003016 | Tri-SM6.1-avb6-TA14-gsgacaaggAfAfCfugauuacaaas | 429 | cPrpusUfuGfuAfaucagUfuCfcUfuGfucsc | 151 |
| | (invAb) | | | |
| AC003017 | Tri-SM6.1-avb6-TA14-gsgacaaggAfAfCfugauuacaaas | 429 | cPrpusUfsusguAfaucagUfuCfcUfugucsc | 152 |
| | (invAb) | | | |
| AC003273 | Tri-SM6.1-avb6-TA14-usgcuguggUfuAfuAfccuacuaas | 434 | cPrpusUfsasgUfaGfgUfauAfaCfcAfcagcsa | 160 |
| | (invAb) | | | |
| AC003505 | Tri-SM6.1-avb6-TA14-usgcuguggUfuAfuaccuacuaas | 443 | cPrpusUfsasgUfaGfgUfauAfaCfcAfcagcsa | 160 |
| | (invAb) | | | |
| AC003506 | Tri-SM6.1-avb6-TA14-usgcuguggUfuAfuaccuacuaas | 443 | cPrpusUfsasguaGfguauAfaCfcAfcagcsa | 146 |
| | (invAb) | | | |
| AC003507 | Tri-SM6.1-avb6-TA14-usgcuguggUfUfAfuaccuacuaas | 440 | cPrpusUfaguaGfguauAfaCfcAfcagcsa | 163 |
| | (invAb) | | | |
| AC003508 | Tri-SM6.1-avb6-TA14-usgcuguggUfUfAfuaccuacuaas | 440 | usUfsasguaGfguauAfaCfcAfcagcsa | 140 |
| | (invAb) | | | |
| AC003526 | Tri-SM6.1-avb6-TA14-gsgacaaggAfAfCfugauuacaaas | 429 | cPrpusUfsusGfuaaucagUfuCfcUfugucsc | 109 |
| | (invAb) | | | |
| AC003527 | Tri-SM6.1-avb6-TA14-gsgacaaggAfAfCfugauuacaaas | 429 | cPrpusUfsusGfuaAfuCfagUfuCfcUfugucsc | 159 |
| | (invAb) | | | |
| AC003528 | Tri-SM6.1-avb6-TA14-gsgacaaggAfAfCfugauuacaaas | 429 | cPrpusUfuGfuaAfuCfagUfuCfcUfugucsc | 164 |
| | (invAb) | | | |
| AC003529 | Tri-SM6.1-avb6-TA14-gsgacaaggAfaCfuGfauuacaaas | 439 | cPrpusUfsusGfuaAfuCfagUfuCfcUfugucsc | 159 |
| | (invAb) | | | |
| AC003530 | Tri-SM6.1-avb6-TA14-gsgacaaggAfaCfuGfauuacaaas | 439 | cPrpusUfsusGfuAfauCfagUfuCfcUfugucsc | 158 |
| | (invAb) | | | |

[0164] In some embodiments, a CoV RNAi agent is prepared or provided as a salt, mixed salt, or a free-acid. In some embodiments, a CoV RNAi agent is prepared or provided as a pharmaceutically acceptable salt. In some embodiments, a CoV RNAi agent is prepared or provided as a pharmaceutically acceptable sodium or potassium salt The RNAi agents described herein, upon delivery to a cell expressing a SARS-CoV-2 viral genome, inhibit or knockdown expression of one or more SARS-CoV-2 viral genomes in vivo and/or in vitro.

### Targeting Groups, Linking Groups, Pharmacokinetic/Pharmacodynamic (PK/PD) Modulators, and Delivery Vehicles

[0165] In some embodiments, a CoV RNAi agent contains or is conjugated to one or more non-nucleotide groups including, but not limited to, a targeting group, a linking group, a pharmacokinetic/pharmacodynamic (PK/PD) modulator, a delivery polymer, or a delivery vehicle. The non-nucleotide group can enhance targeting, delivery, or attachment of the RNAi agent. The non-nucleotide group can be covalently linked to the 3′ and/or 5′ end of either the sense strand and/or the antisense strand. In some embodiments, a CoV RNAi agent contains a non-nucleotide group linked to the 3′ and/or 5′ end of the sense strand. In some embodiments, a non-nucleotide group is linked to the 5′ end of a CoV RNAi agent sense strand. A non-nucleotide group can be linked directly or indirectly to the RNAi agent via a linker/linking group. In some embodiments, a non-nucleotide group is linked to the RNAi agent via a labile, cleavable, or reversible bond or linker.

[0166] In some embodiments, a non-nucleotide group enhances the pharmacokinetic or biodistribution properties of an RNAi agent or conjugate to which it is attached to improve cell- or tissue-specific distribution and cell-specific uptake of the conjugate. In some embodiments, a non-nucleotide group enhances endocytosis of the RNAi agent.

[0167] Targeting groups or targeting moieties enhance the pharmacokinetic or biodistribution properties of a conjugate or RNAi agent to which they are attached to improve cell-specific (including, in some cases, organ specific) distribution and cell-specific (or organ specific) uptake of the conjugate or RNAi agent. A targeting group can be monovalent, divalent, trivalent, tetravalent, or have higher valency for the target to which it is directed. Representative targeting groups include, without limitation, compounds with affinity to cell surface molecule, cell receptor ligands, hapten, antibodies, monoclonal antibodies, antibody fragments, and antibody mimics with affinity to cell surface molecules. In some embodiments, a targeting group is linked to an RNAi agent using a linker, such as a PEG linker or one, two, or three abasic and/or ribitol (abasic ribose) residues, which in some instances can serve as linkers.

[0168] A targeting group, with or without a linker, can be attached to the 5′ or 3′ end of any of the sense and/or antisense strands disclosed in Tables 3, 4, 5, 6, and 10. A linker, with or without a targeting group, can be attached to the 5′ or 3′ end of any of the sense and/or antisense strands disclosed in Tables 3, 4, 5, 6, and 10.

[0169] The CoV RNAi agents described herein can be synthesized having a reactive group, such as an amino group (also referred to herein as an amine), at the 5′-terminus and/or the 3′-terminus. The reactive group can be used subsequently to attach a targeting moiety using methods typical in the art.

[0170] For example, in some embodiments, the CoV RNAi agents disclosed herein are synthesized having an NH2-C6 group at the 5′-terminus of the sense strand of the RNAi agent. The terminal amino group subsequently can be reacted to form a conjugate with, for example, a group that includes an αvβ6 integrin targeting ligand. In some embodiments, the CoV RNAi agents disclosed herein are synthesized having one or more alkyne groups at the 5′-terminus of the sense strand of the RNAi agent. The terminal alkyne group(s) can subsequently be reacted to form a conjugate with, for example, a group that includes an αvβ6 integrin targeting ligand.

[0171] In some embodiments, a targeting group comprises an integrin targeting ligand. In some embodiments, an integrin targeting ligand is an αvβ6 integrin targeting ligand. The use of an αvβ6 integrin targeting ligand facilitates cell-specific targeting to cells having αvβ6 on its respective surface, and binding of the integrin targeting ligand can facilitate entry of the therapeutic agent, such as an RNAi agent, to which it is linked, into cells such as epithelial cells, including pulmonary epithelial cells and renal epithelial cells. Integrin targeting ligands can be monomeric or monovalent (e.g., having a single integrin targeting moiety) or multimeric or multivalent (e.g., having multiple integrin targeting moieties). The targeting group can be attached to the 3′ and/or 5′ end of the RNAi oligonucleotide using methods known in the art. The preparation of targeting groups, such as αvβ6 integrin targeting ligands, is described, for example, in International Patent Application Publication No. WO 2018/085415 and in International Patent Application Publication No. WO 2019/089765, the contents of each of which are incorporated herein in its entirety.

[0172] In some embodiments, targeting groups are linked to the CoV RNAi agents without the use of an additional linker. In some embodiments, the targeting group is designed having a linker readily present to facilitate the linkage to a CoV RNAi agent. In some embodiments, when two or more RNAi agents are included in a composition, the two or more RNAi agents can be linked to their respective targeting groups using the same linkers. In some embodiments, when two or more RNAi agents are included in a composition, the two or more RNAi agents are linked to their respective targeting groups using different linkers.

[0173] In some embodiments, a linking group is conjugated to the RNAi agent. The linking group facilitates covalent linkage of the agent to a targeting group, pharmacokinetic modulator, delivery polymer, or delivery vehicle. The linking group can be linked to the 3′ and/or the 5′ end of the RNAi agent sense strand or antisense strand. In some embodiments, the linking group is linked to the RNAi agent sense strand. In some embodiments, the linking group is conjugated to the 5′ or 3′ end of an RNAi agent sense strand. In some embodiments, a linking group is conjugated to the 5′ end of an RNAi agent sense strand. Examples of linking groups, include but are not limited to: C6-SS—C6, 6-SS-6, reactive groups such a primary amines (e.g., NH2-C6) and alkynes, alkyl groups, abasic residues/nucleotides, amino acids, tri-alkyne functionalized groups, ribitol, and/or PEG groups. Examples of certain linking groups are provided in Table 11.

[0174] A linker or linking group is a connection between two atoms that links one chemical group (such as an RNAi agent) or segment of interest to another chemical group (such as a targeting group, pharmacokinetic modulator, or delivery polymer) or segment of interest via one or more covalent bonds. A labile linkage contains a labile bond. A linkage can optionally include a spacer that increases the distance between the two joined atoms. A spacer may further add flexibility and/or length to the linkage. Spacers include, but are not limited to, alkyl groups, alkenyl groups, alkynyl groups, aryl groups, aralkyl groups, aralkenyl groups, and aralkynyl groups; each of which can contain one or more heteroatoms, heterocycles, amino acids, nucleotides, and saccharides. Spacer groups are well known in the art and the preceding list is not meant to limit the scope of the description. In some embodiments, a CoV RNAi agent is conjugated to a polyethylene glycol (PEG) moiety, or to a hydrophobic group having 12 or more carbon atoms, such as a cholesterol or palmitoyl group.

[0175] In some embodiments, a CoV RNAi agent is linked to one or more pharmacokinetic/pharmacodynamic (PK/PD) modulators. PK/PD modulators can increase circulation time of the conjugated drug and/or increase the activity of the RNAi agent through improved cell receptor binding, improved cellular uptake, and/or other means. Various PK/PD modulators suitable for use with RNAi agents are known in the art. In some embodiments, the PK/PD modulatory can be cholesterol or cholesteryl derivatives, or in some circumstances a PK/PD modulator can be comprised of alkyl groups, alkenyl groups, alkynyl groups, aryl groups, aralkyl groups, aralkenyl groups, or aralkynyl groups, each of which may be linear, branched, cyclic, and/or substituted or unsubstituted. In some embodiments, the location of attachment for these moieties is at the 5′ or 3′ end of the sense strand, at the 2′ position of the ribose ring of any given nucleotide of the sense strand, and/or attached to the phosphate or phosphorothioate backbone at any position of the sense strand.

[0176] Any of the CoV RNAi agent nucleotide sequences listed in Tables 3, 4, 5, 6, and 10, whether modified or unmodified, can contain 3′ and/or 5′ targeting group(s), linking group(s), and/or PK/PD modulator(s). Any of the CoV RNAi agent sequences listed in Tables 3, 4, 5, 6, and 10, or are otherwise described herein, which contain a 3′ or 5′ targeting group, linking group, and/or PK/PD modulator can alternatively contain no 3′ or 5′ targeting group, linking group, or PK/PD modulator, or can contain a different 3′ or 5′ targeting group, linking group, or pharmacokinetic modulator including, but not limited to, those depicted in Table 11. Any of the CoV RNAi agent duplexes listed in Tables 7A-2, 7B-2, 8B, 9B, and 10B, whether modified or unmodified, can further comprise a targeting group or linking group, including, but not limited to, those depicted in Table 11, and the targeting group or linking group can be attached to the 3′ or 5′ terminus of either the sense strand or the antisense strand of the CoV RNAi agent duplex.

[0177] Examples of certain modified nucleotides, capping moieties, and linking groups are provided in Table 11.

TABLE 11
Structures Representing Various Modified Nucleotides, Capping Moieties, and
Linking Groups (wherein [symbol] indicates the point of connection)

| | |
|---|---|
| [chemical structure] | [chemical structure] |
| cPrpu | cPrpus |
| [chemical structure] | [chemical structure] |
| cPrpa | cPrPas |
| [chemical structure] | [chemical structure] |
| cPrpi | cPrpis |
| [chemical structure] a_2N | [chemical structure] |

When positioned internally:

| | |
|---|---|
| [chemical structure] | [chemical structure] |

When positioned at the 3′ terminal end:

[chemical structure]

When positioned at the 3′ terminal end:

[chemical structure]

When positioned internally:

[chemical structure]

When position at the 3′ terminal end:

[chemical structure]

When positioned internally:

[chemical structure]

| | |
|---|---|
| [chemical structure] | [chemical structure] |
| [chemical structure] | [chemical structure] |

[chemical structure]

[chemical structure]

[chemical structure]

[chemical structure]

[chemical structure]

[chemical structure]

[chemical structure]

[chemical structure]

[chemical structure]

[chemical structure]

| | |
|---|---|
| [chemical structure] | [chemical structure] |
| [chemical structure] | [chemical structure] |
| [chemical structure] | [chemical structure] |
| [chemical structure] | [chemical structure] |

[0178] Alternatively, other linking groups known in the art may be used. In many instances, linking groups can be commercially acquired or alternatively, are incorporated into commercially available nucleotide phosphoramidites. (See, e.g., International Patent Application Publication No. WO 2019/161213, which is incorporated herein by reference in its entirety).

[0179] In some embodiments, a CoV RNAi agent is delivered without being conjugated to a targeting ligand or pharmacokinetic/pharmacodynamic (PK/PD) modulator (referred to as being “naked” or a “naked RNAi agent”).

[0180] In some embodiments, a CoV RNAi agent is conjugated to a targeting group, a linking group, a PK modulator, and/or another non-nucleotide group to facilitate delivery of the CoV RNAi agent to the cell or tissue of choice, for example, to an epithelial cell in vivo. In some embodiments, a CoV RNAi agent is conjugated to a targeting group wherein the targeting group includes an integrin targeting ligand. In some embodiments, the integrin targeting ligand is an αvβ6 integrin targeting ligand. In some embodiments, a targeting group includes one or more αvβ6 integrin targeting ligands.

[0181] In some embodiments, a delivery vehicle may be used to deliver an RNAi agent to a cell or tissue. A delivery vehicle is a compound that improves delivery of the RNAi agent to a cell or tissue. A delivery vehicle can include, or consist of, but is not limited to: a polymer, such as an amphipathic polymer, a membrane active polymer, a peptide, a melittin peptide, a melittin-like peptide (MLP), a lipid, a reversibly modified polymer or peptide, or a reversibly modified membrane active polyamine.

[0182] In some embodiments, the RNAi agents can be combined with lipids, nanoparticles, polymers, liposomes, micelles, DPCs or other delivery systems available in the art for nucleic acid delivery. The RNAi agents can also be chemically conjugated to targeting groups, lipids (including, but not limited to cholesteryl and cholesteryl derivatives), encapsulating in nanoparticles, liposomes, micelles, conjugating to polymers or DPCs (see, for example WO 2000/053722, WO 2008/022309, WO 2011/104169, and WO 2012/083185, WO 2013/032829, WO 2013/158141, each of which is incorporated herein by reference), by iontophoresis, or by incorporation into other delivery vehicles or systems available in the art such as hydrogels, cyclodextrins, biodegradable nanocapsules, bioadhesive microspheres, or proteinaceous vectors. In some embodiments the RNAi agents can be conjugated to antibodies having affinity for pulmonary epithelial cells. In some embodiments, the RNAi agents can be linked to targeting ligands that have affinity for pulmonary epithelial cells or receptors present on pulmonary epithelial cells.

### Pharmaceutical Compositions and Formulations

[0183] The CoV RNAi agents disclosed herein can be prepared as pharmaceutical compositions or formulations (also referred to herein as “medicaments”). In some embodiments, pharmaceutical compositions include at least one CoV RNAi agent. These pharmaceutical compositions are particularly useful in the inhibition of the expression of SARS-CoV-2 RNA or another CoV RNA transcript in a target cell, a group of cells, a tissue, or an organism. The pharmaceutical compositions can be used to treat a subject having a disease, disorder, or condition that would benefit from reduction in the level of the target coronavirus mRNA or RNA transcript, or inhibition in expression of the target viral genome. The pharmaceutical compositions can be used to treat a subject at risk of developing a disease or disorder that would benefit from reduction of the level of the target RNA or the target viral genome. In one embodiment, the method includes administering a CoV RNAi agent linked to a targeting ligand as described herein, to a subject to be treated. In some embodiments, one or more pharmaceutically acceptable excipients (including vehicles, carriers, diluents, and/or delivery polymers) are added to the pharmaceutical compositions that include a CoV RNAi agent, thereby forming a pharmaceutical formulation or medicament suitable for in vivo delivery to a subject, including a human.

[0184] The pharmaceutical compositions that include a CoV RNAi agent and methods disclosed herein decrease the level of the target coronavirus RNA in a cell, group of cells, group of cells, tissue, organ, or subject, including by administering to the subject a therapeutically effective amount of a herein described CoV RNAi agent, thereby inhibiting the expression of SARS-CoV-2 RNA or another CoV RNA or RNA transcript in the subject. In some embodiments, the subject has been previously identified or diagnosed as having a disease or disorder related to CoV infection, including SARS-CoV-2 infection, such as COVID-19. In some embodiments, the subject has been previously diagnosed with having pulmonary inflammation or other pulmonary symptoms consistent with a CoV infection.

[0185] Embodiments of the present disclosure include pharmaceutical compositions for delivering a CoV RNAi agent to a pulmonary epithelial cell in vivo. Such pharmaceutical compositions can include, for example, a CoV RNAi agent conjugated to a targeting group that comprises an integrin targeting ligand. In some embodiments, the integrin targeting ligand is comprised of an αvβ6 integrin ligand.

[0186] In some embodiments, the described pharmaceutical compositions including a CoV RNAi agent are used for treating or managing clinical presentations in a subject that would benefit from the inhibition of expression of SARS-CoV-2. In some embodiments, a therapeutically or prophylactically effective amount of one or more of pharmaceutical compositions is administered to a subject in need of such treatment. In some embodiments, administration of any of the disclosed CoV RNAi agents can be used to decrease the number, severity, and/or frequency of symptoms of a disease in a subject.

[0187] In some embodiments, the described CoV RNAi agents are optionally combined with one or more additional (i.e., second, third, etc.) therapeutics. A second therapeutic can be another CoV RNAi agent (e.g., a CoV RNAi agent that targets a different sequence within a SARS-CoV-2 viral genome). In some embodiments, a second therapeutic can be an RNAi agent that targets the SARS-CoV-2 viral genome or the genome of a different coronavirus. An additional therapeutic can also be a small molecule drug, antibody, antibody fragment. peptide, vaccine, and/or aptamer. The CoV RNAi agents, with or without the one or more additional therapeutics, can be combined with one or more excipients to form pharmaceutical compositions.

[0188] The described pharmaceutical compositions that include a CoV RNAi agent can be used to treat at least one symptom in a subject having a disease or disorder caused by a coronavirus infection. In some embodiments, the subject is administered a therapeutically effective amount of one or more pharmaceutical compositions that include a CoV RNAi agent thereby treating the symptom. In other embodiments, the subject is administered a prophylactically effective amount of one or more CoV RNAi agents, thereby preventing or inhibiting the at least one symptom by preventing the coronavirus from establishing itself and replicating in the cells of the organism.

[0189] In some embodiments, one or more of the described CoV RNAi agents are administered to a mammal in a pharmaceutically acceptable carrier or diluent. In some embodiments, the mammal is a human.

[0190] The route of administration is the path by which a CoV RNAi agent is brought into contact with the body. In general, methods of administering drugs, oligonucleotides, and nucleic acids, for treatment of a mammal are well known in the art and can be applied to administration of the compositions described herein. The CoV RNAi agents disclosed herein can be administered via any suitable route in a preparation appropriately tailored to the particular route. Thus, in some embodiments, the herein described pharmaceutical compositions are administered via inhalation, intranasal administration, intratracheal administration, or oropharyngeal aspiration administration. In some embodiments, the pharmaceutical compositions can be administered by injection, for example, intravenously, intramuscularly, intracutaneously, subcutaneously, intraarticularly, intraocularly, or intraperitoneally, or topically.

[0191] The pharmaceutical compositions including a CoV RNAi agent described herein can be delivered to a cell, group of cells, tissue, or subject using oligonucleotide delivery technologies known in the art. In general, any suitable method recognized in the art for delivering a nucleic acid molecule (in vitro or in vivo) can be adapted for use with the compositions described herein. For example, delivery can be by local administration, (e.g., direct injection, implantation, or topical administering), systemic administration, or subcutaneous, intravenous, intraperitoneal, or parenteral routes, including intracranial (e.g., intraventricular, intraparenchymal and intrathecal), intramuscular, transdermal, airway (aerosol), nasal, oral, rectal, or topical (including buccal and sublingual) administration. In some embodiments, the compositions are administered via inhalation, intranasal administration, oropharyngeal aspiration administration, or intratracheal administration. For example, in some embodiments, it is desired that the CoV RNAi agents described herein inhibit the expression of a SARS-CoV-2 viral genome or the genome of another coronavirus in the pulmonary epithelium, for which administration via inhalation (e.g., by an inhaler device, such as a metered-dose inhaler, or a nebulizer such as a jet or vibrating mesh nebulizer, or a soft mist inhaler) is particularly suitable and advantageous

[0192] In some embodiments, the pharmaceutical compositions described herein comprise one or more pharmaceutically acceptable excipients. The pharmaceutical compositions described herein are formulated for administration to a subject.

[0193] As used herein, a pharmaceutical composition or medicament includes a pharmacologically effective amount of at least one of the described therapeutic compounds and one or more pharmaceutically acceptable excipients. Pharmaceutically acceptable excipients (excipients) are substances other than the Active Pharmaceutical Ingredient (API, therapeutic product, e.g., CoV RNAi agent) that are intentionally included in the drug delivery system. Excipients do not exert or are not intended to exert a therapeutic effect at the intended dosage. Excipients can act to a) aid in processing of the drug delivery system during manufacture, b) protect, support or enhance stability, bioavailability or patient acceptability of the API, c) assist in product identification, and/or d) enhance any other attribute of the overall safety, effectiveness, of delivery of the API during storage or use. A pharmaceutically acceptable excipient may or may not be an inert substance.

[0194] Excipients include, but are not limited to: absorption enhancers, anti-adherents, anti-foaming agents, anti-oxidants, binders, buffering agents, carriers, coating agents, colors, delivery enhancers, delivery polymers, detergents, dextran, dextrose, diluents, disintegrants, emulsifiers, extenders, fillers, flavors, glidants, humectants, lubricants, oils, polymers, preservatives, saline, salts, solvents, sugars, surfactants, suspending agents, sustained release matrices, sweeteners, thickening agents, tonicity agents, vehicles, water-repelling agents, and wetting agents.

[0195] Pharmaceutical compositions suitable for injectable use include sterile aqueous solutions (where water-soluble) or dispersions and sterile powders for the extemporaneous preparation of sterile injectable solutions or dispersion. For intravenous administration, suitable carriers include physiological saline, bacteriostatic water, Cremophor® ELTM (BASF, Parsippany, NJ) or phosphate buffered saline (PBS). It should be stable under the conditions of manufacture and storage and should be preserved against the contaminating action of microorganisms such as bacteria and fungi. The carrier can be a solvent or dispersion medium containing, for example, water, ethanol, polyol (for example, glycerol, propylene glycol, and liquid polyethylene glycol), and suitable mixtures thereof. The proper fluidity can be maintained, for example, by the use of a coating such as lecithin, by the maintenance of the required particle size in the case of dispersion and by the use of surfactants. In many cases, it will be preferable to include isotonic agents, for example, sugars, polyalcohols such as mannitol, sorbitol, and sodium chloride in the composition. Prolonged absorption of the injectable compositions can be brought about by including in the composition an agent which delays absorption, for example, aluminum monostearate and gelatin.

[0196] Sterile injectable solutions can be prepared by incorporating the active compound in the required amount in an appropriate solvent with one or a combination of ingredients enumerated above, as required, followed by filter sterilization. Generally, dispersions are prepared by incorporating the active compound into a sterile vehicle which contains a basic dispersion medium and the required other ingredients from those enumerated above. In the case of sterile powders for the preparation of sterile injectable solutions, methods of preparation include vacuum drying and freeze-drying which yields a powder of the active ingredient plus any additional desired ingredient from a previously sterile-filtered solution thereof.

[0197] Formulations suitable for intra-articular administration can be in the form of a sterile aqueous preparation of the drug that can be in microcrystalline form, for example, in the form of an aqueous microcrystalline suspension. Liposomal formulations or biodegradable polymer systems can also be used to present the drug for both intra-articular and ophthalmic administration.

[0198] Formulations suitable for inhalation administration can be prepared by incorporating the active compound in the desired amount in an appropriate solvent, followed by sterile filtration. In general, formulations for inhalation administration are sterile solutions at physiological pH and have low viscosity (<5 cP). Salts may be added to the formulation to balance tonicity. In some cases, surfactants or co-solvents can be added to increase active compound solubility and improve aerosol characteristics. In some cases, excipients can be added to control viscosity in order to ensure size and distribution of nebulized droplets.

[0199] In some embodiments, pharmaceutical formulations that include the CoV RNAi agents disclosed herein suitable for inhalation administration can be prepared in water for injection (sterile water), or an aqueous sodium phosphate buffer (for example, the CoV RNAi agent formulated in 0.5 mM sodium phosphate monobasic, 0.5 mM sodium phosphate dibasic, in water).

[0200] The active compounds can be prepared with carriers that will protect the compound against rapid elimination from the body, such as a controlled release formulation, including implants and microencapsulated delivery systems. Biodegradable, biocompatible polymers can be used, such as ethylene vinyl acetate, polyanhydrides, polyglycolic acid, collagen, polyorthoesters, and polylactic acid. Methods for preparation of such formulations will be apparent to those skilled in the art. Liposomal suspensions can also be used as pharmaceutically acceptable carriers. These can be prepared according to methods known to those skilled in the art, for example, as described in U.S. Pat. No. 4,522,811.

[0201] The CoV RNAi agents can be formulated in compositions in dosage unit form for ease of administration and uniformity of dosage. Dosage unit form refers to physically discrete units suited as unitary dosages for the subject to be treated; each unit containing a predetermined quantity of active compound calculated to produce the desired therapeutic effect in association with the required pharmaceutical carrier. The specification for the dosage unit forms of the disclosure are dictated by and directly dependent on the unique characteristics of the active compound and the therapeutic effect to be achieved, and the limitations inherent in the art of compounding such an active compound for the treatment of individuals.

[0202] A pharmaceutical composition can contain other additional components commonly found in pharmaceutical compositions. Such additional components include, but are not limited to: anti-pruritics, astringents, local anesthetics, or anti-inflammatory agents (e.g., antihistamine, diphenhydramine, etc.). It is also envisioned that cells, tissues, or isolated organs that express or comprise the herein defined RNAi agents may be used as “pharmaceutical compositions.” As used herein, “pharmacologically effective amount,” “therapeutically effective amount,” or simply “effective amount” refers to that amount of an RNAi agent to produce a pharmacological, therapeutic, or preventive result.

[0203] In some embodiments, the methods disclosed herein further comprise the step of administering a second therapeutic or treatment in addition to administering an RNAi agent disclosed herein. In some embodiments, the second therapeutic is another CoV RNAi agent (e.g., a CoV RNAi agent that targets a different sequence within the SARS-CoV-2 target). In other embodiments, the second therapeutic can be a small molecule drug, an antibody, an antibody fragment, a peptide, a vaccine, and/or an aptamer.

[0204] In some embodiments, described herein are compositions that include a combination or cocktail of at least two CoV RNAi agents having different sequences. In some embodiments, the two or more CoV RNAi agents are each separately and independently linked to targeting groups. In some embodiments, the two or more CoV RNAi agents are each linked to targeting groups that include or consist of integrin targeting ligands. In some embodiments, the two or more CoV RNAi agents are each linked to targeting groups that include or consist of αvβ6 integrin targeting ligands.

[0205] In some embodiments, described herein are compositions that include a combination or cocktail of one or more CoV RNAi agents and RNAi agents targeting other genes associated with causing CoV-related diseases. The other genes associated with causing CoV-related diseases can be, but are not limited to, genes that are associated with the severity of CoV-related diseases. In some embodiments, the combination of CoV RNAi agent(s) and RNAi agents targeting other genes associated with causing CoV-related diseases are each linked to targeting groups that include or consist of αvβ6 integrin targeting ligands. In some embodiments, CoV RNAi(s) are used in combination with RNAi agents targeting other genes associated with causing CoV-related diseases. In some embodiments the RNAi agents targeting other genes associated with causing CoV-related diseases are RNAi agents targeting to transmembrane serine protease 2 (TMPRSS2).

[0206] Described herein are compositions for delivery of CoV RNAi agents to pulmonary epithelial cells.

[0207] Generally, an effective amount of a CoV RNAi agent disclosed herein will be in the range of from about 0.0001 to about 30 mg/kg of body weight/deposited dose, e.g., from about 0.001 to about 5 mg/kg of body weight/deposited dose. In some embodiments, an effective amount of a CoV RNAi agent will be in the range of from about 0.01 mg/kg to about 3.0 mg/kg of body weight per deposited dose. In some embodiments, an effective amount of a CoV RNAi agent will be in the range of from about 0.03 mg/kg to about 2.0 mg/kg of body weight per deposited dose. In some embodiments, an effective amount of a CoV RNAi agent will be in the range of from about 0.01 to about 1.0 mg/kg of deposited dose per body weight. In some embodiments, an effective amount of a CoV RNAi agent will be in the range of from about 0.50 to about 1.0 mg/kg of deposited dose per body weight. The amount administered will also likely depend on such variables as the overall health status of the patient, the relative biological efficacy of the compound delivered, the formulation of the drug, the presence and types of excipients in the formulation, and the route of administration. Also, it is to be understood that the initial dosage administered can be increased beyond the above upper level to rapidly achieve the desired blood-level or tissue level, or the initial dosage can be smaller than the optimum. In some embodiments, a dose is administered daily. In some embodiments, a dose is administered weekly. In further embodiments, a dose is administered bi-weekly, tri-weekly, once monthly, or once quarterly (i.e., once every three months).

[0208] For treatment of disease or for formation of a medicament or composition for treatment of a disease, the pharmaceutical compositions described herein including a CoV RNAi agent can be combined with an excipient or with a second therapeutic agent or treatment including, but not limited to: a second or other RNAi agent, a small molecule drug, an antibody, an antibody fragment, a peptide, a vaccine and/or an aptamer.

[0209] The described CoV RNAi agents, when added to pharmaceutically acceptable excipients or adjuvants, can be packaged into kits, containers, packs, or dispensers. The pharmaceutical compositions described herein can be packaged in dry powder or aerosol inhalers, other metered-dose inhalers, nebulizers, pre-filled syringes, or vials.

### Methods of Treatment and Inhibition of CoV Viral Genomes

[0210] The CoV RNAi agents disclosed herein can be used to treat a subject (e.g., a human or other mammal) having a disease or disorder that would benefit from administration of the RNAi agent. In some embodiments, the RNAi agents disclosed herein can be used to treat a subject (e.g., a human) that would benefit from a reduction and/or inhibition in expression of SARS-CoV-2 mRNA and/or viral transcripts, or a reduction and/or inhibition of another coronavirus that is infecting the subject.

[0211] In some embodiments, the RNAi agents disclosed herein can be used to treat a subject (e.g., a human) having a disease or disorder caused by a coronavirus infection, including but not limited to, pulmonary inflammation or COVID-19. Treatment of a subject can include therapeutic and/or prophylactic treatment. The subject is administered a therapeutically effective amount of any one or more CoV RNAi agents described herein. The subject can be a human, patient, or human patient. The subject may be an adult, adolescent, child, or infant. Administration of a pharmaceutical composition described herein can be to a human being or animal.

[0212] In certain embodiments, the present disclosure provides methods for treatment of diseases, disorders, conditions, or pathological states mediated at least in part by SARS-CoV-2 viral genome expression, in a patient in need thereof, wherein the methods include administering to the patient any of the CoV RNAi agents described herein.

[0213] In some embodiments, the CoV RNAi agents are used to treat or manage a clinical presentation or pathological state in a subject, wherein the clinical presentation or pathological state is caused by a coronavirus infection. The subject is administered a therapeutically effective amount of one or more of the CoV RNAi agents or CoV RNAi agent-containing compositions described herein. In some embodiments, the method comprises administering a composition comprising a CoV RNAi agent described herein to a subject to be treated.

[0214] In a further aspect, the disclosure features methods of treatment (including prophylactic or preventative treatment) of diseases or symptoms that may be addressed by a reduction in CoV mRNA or RNA transcripts, including for example a reduction in SARS-CoV-2 mRNA or RNA transcripts, the methods comprising administering to a subject in need thereof a CoV RNAi agent that includes an antisense strand comprising the sequence of any of the sequences in Table 3B or Table 10B. Also described herein are compositions for use in such methods.

[0215] In another aspect, the disclosure provides methods for the treatment (including prophylactic treatment) of a pathological state (such as a condition or disease) caused by a coronavirus infection, such as COVID-19, wherein the methods include administering to a subject a therapeutically effective amount of an RNAi agent that includes an antisense strand comprising the sequence of any of the sequences in Table 3B or Table 10B.

[0216] In some embodiments, methods for inhibiting expression of a SARS-CoV-2 viral genome are disclosed herein, wherein the methods include administering to a cell an RNAi agent that includes an antisense strand comprising the sequence of any of the sequences in Table 3B or Table 10B.

[0217] In some embodiments, methods for the treatment (including prophylactic treatment) of a pathological state mediated at least in part by SARS-CoV-2 viral RNA are disclosed herein, wherein the methods include administering to a subject a therapeutically effective amount of an RNAi agent that includes a sense strand comprising the sequence of any of the sequences in Table 4B, Table 5B, Table 6B, or Table 10B.

[0218] In some embodiments, methods for inhibiting expression of a SARS-CoV-2 viral genome are disclosed herein, wherein the methods comprise administering to a cell an RNAi agent that includes a sense strand comprising the sequence of any of the sequences in Table 4B, Table 5B, Table 6B, or Table 10B.

[0219] In some embodiments, methods for the treatment (including prophylactic treatment) of a pathological state mediated at least in part by SARS-CoV-2 viral RNA are disclosed herein, wherein the methods include administering to a subject a therapeutically effective amount of an RNAi agent that includes a sense strand comprising the sequence of any of the sequences in Table 4B, Table 5B, Table 6B, or Table 10B, and an antisense strand comprising the sequence of any of the sequences in Table 3B or Table 1 OB.

[0220] In some embodiments, methods for inhibiting expression of a SARS-CoV-2 viral genome are disclosed herein, wherein the methods include administering to a cell an RNAi agent that includes a sense strand comprising the sequence of any of the sequences in Table 4B, Table 5B, Table 6B, or Table 10B, and an antisense strand comprising the sequence of any of the sequences in Table 3B or Table 10B.

[0221] In some embodiments, methods of inhibiting expression of a SARS-CoV-2 viral genome are disclosed herein, wherein the methods include administering to a subject a CoV RNAi agent that includes a sense strand consisting of the nucleobase sequence of any of the sequences in Table 4B, Table 5B, Table 6W, or Table 10B, and the antisense strand consisting of the nucleobase sequence of any of the sequences in Table 3B or Table 10B. In other embodiments, disclosed herein are methods of inhibiting expression of a SARS-CoV-2 viral genome, wherein the methods include administering to a subject a CoV RNAi agent that includes a sense strand consisting of the modified sequence of any of the modified sequences in Table 4B, Table 5B, Table 6B, or Table 10B, and the antisense strand consisting of the modified sequence of any of the modified sequences in Table 3B or Table 10B.

[0222] In some embodiments, methods for inhibiting expression of a SARS-CoV-2 viral genome in a cell are disclosed herein, wherein the methods include administering one or more CoV RNAi agents comprising a duplex structure of one of the duplexes set forth in Tables 7A-2, 7B-2, 8B, 9B, and 10B.

[0223] In some embodiments, the SARS-CoV-2 viral RNA level in certain epithelial cells of subject to whom a described CoV RNAi agent is administered is reduced by at least about 5%, 10%, 15%, 20%, 25%, 30%, 35%, 40%, 45%, 50%, 55%, 60%, 65%, 70%, 75%, 80%, 85%, 90%, 95%, 96%, 97%, 98%, 99%, or greater than 99%, relative to the subject prior to being administered the CoV RNAi agent or to a subject not receiving the CoV RNAi agent. In some embodiments, the SARS-CoV-2 subgenomic RNA levels in certain epithelial cells of a subject to whom a described CoV RNAi agent is administered is reduced by at least about 5%, 10%, 15%, 20%, 25%, 30%, 35%, 40%, 45%, 50%, 55%, 60%, 65%, 70%, 75%, 80%, 85%, 90%, 95%, 96%, 97%, 98%, 99%, or greater than 99%, relative to the subject prior to being administered the CoV RNAi agent or to a subject not receiving the CoV RNAi agent. The viral RNA transcript level, mRNA level, and/or subgenomic RNA level in the subject may be reduced in a cell, group of cells, and/or tissue of the subject. In some embodiments, the SARS-CoV-2 mRNA levels in certain epithelial cells subject to whom a described CoV RNAi agent has been administered is reduced by at least about 30%, 35%, 40%, 45%, 50%, 55%, 60%, 65%, 70%, 75%, 80%, 85%, 90%, 95%, or 98% relative to the subject prior to being administered the CoV RNAi agent or to a subject not receiving the CoV RNAi agent.

[0224] In some embodiments, methods for the treatment (including prophylactic treatment) of a pathological state mediated at least in part by SARS-CoV-2 viral RNA are disclosed herein, wherein the methods include administering to a subject a therapeutically effective amount of a combination of an RNAi agent that includes a sense strand comprising the sequence of any of the sequences in Table 4B, Table 5B, Table 6B, or Table 10B, and an antisense strand comprising the sequence of any of the sequences in Table 3B or Table 10B, in addition to RNAi agents targeting other genes associated with causing CoV-related diseases. The other genes associated with causing CoV-related diseases can be, but are not limited to, genes that are associated with the severity of CoV-related diseases. In some embodiments, the combination of CoV RNAi agent(s) and RNAi agents targeting other genes associated with causing CoV-related diseases are each linked to targeting groups that include or consist of αvβ6 integrin targeting ligands. In some embodiments, CoV RNAi(s) are used in combination with RNAi agents targeting other genes associated with causing CoV-related diseases. In some embodiments the RNAi agents targeting other genes associated with causing CoV-related diseases are RNAi agents targeting to transmembrane serine protease 2 (TMPRSS2).

[0225] Reductions in viral RNA can be assessed by any methods known in the art and are collectively referred to herein as a decrease in, reduction of, or inhibition of SARS-CoV-2. The Examples set forth herein illustrate known methods for assessing inhibition of SARS-CoV-2 viral RNA.

### Cells, Tissues, Organs, and Non-Human Organisms

[0226] Cells, tissues, organs, and non-human organisms that include at least one of the CoV RNAi agents described herein are contemplated. The cell, tissue, organ, or non-human organism is made by delivering the RNAi agent to the cell, tissue, organ, or non-human organism.

### ADDITIONAL ILLUSTRATIVE EMBODIMENTS

[0227] Provided here are certain additional illustrative embodiments of the disclosed technology. These embodiments are illustrative only and do not limit the scope of the present disclosure or of the claims attached hereto.
[0228] 1. An RNAi agent for inhibiting expression of a coronavirus (CoV) genome, comprising:
   [0229] an antisense strand comprising any one of the modified sequences provided in Table 3B; and
   [0230] a sense strand comprising a nucleotide sequence that is at least partially complementary to the antisense strand.
[0231] 2. The RNAi agent of embodiment 1, wherein the sense strand comprises a nucleotide sequence of at least 17 contiguous nucleotides differing by 0 or 1 nucleotides from any one of the sequences provided in Table 4B, and wherein the sense strand has a region of at least 85% complementarity over the 17 contiguous nucleotides to the antisense strand.
[0232] 3. The RNAi agent of any one of embodiments 1-2, wherein all or substantially all of the nucleotides are modified nucleotides.
[0233] 4. The RNAi agent of any one of embodiments 1-3, wherein the modified nucleotide is selected from the group consisting of: 2′-O-methyl nucleotide, 2′-fluoro nucleotide, 2′-deoxy nucleotide, 2′,3′-seco nucleotide mimic, locked nucleotide, 2′-F-arabino nucleotide, 2′-methoxyethyl nucleotide, abasic nucleotide, ribitol, inverted nucleotide, inverted 2′-O-methyl nucleotide, inverted 2′-deoxy nucleotide, 2′-amino-modified nucleotide, 2′-alkyl-modified nucleotide, morpholino nucleotide, vinyl phosphonate-containing nucleotide, cyclopropyl phosphonate-containing nucleotide, and 3′O-methyl nucleotide.
[0234] 5. The RNAi agent of embodiment 3, wherein all or substantially all of the nucleotides are modified with 2′-O-methyl nucleotides, 2′-fluoro nucleotides, or combinations thereof.
[0235] 6. An RNAi agent for inhibiting expression of a coronavirus (CoV) genome, comprising:
   [0236] a sense strand comprising the nucleotide sequence of any one of the modified sequences provided in Table 4B; and
   [0237] an antisense strand comprising a nucleotide sequence that is at least partially complementary to the sense strand.
[0238] 7. The RNAi agent of embodiment 1, wherein the antisense strand comprises the nucleotide sequence of any one of the modified sequences provided in Table 3B and the sense strand comprises the nucleotide sequence of any one of the modified sequences provided in Table 4B.
[0239] 8. The RNAi agent of any one of embodiments 1-7, wherein the sense strand is between 18 and 30 nucleotides in length, and the antisense strand is between 18 and 30 nucleotides in length.
[0240] 9. The RNAi agent of embodiment 8, wherein the sense strand and the antisense strand are each between 18 and 27 nucleotides in length.
[0241] 10. The RNAi agent of embodiment 9, wherein the sense strand and the antisense strand are each between 18 and 24 nucleotides in length.
[0242] 11. The RNAi agent of embodiment 10, wherein the sense strand and the antisense strand are each 21 nucleotides in length.
[0243] 12. The RNAi agent of embodiment 11, wherein the RNAi agent has two blunt ends.
[0244] 13. The RNAi agent of any one of embodiments 1-12, wherein the sense strand comprises one or two terminal caps.
[0245] 14. The RNAi agent of any one of embodiments 1-13, wherein the sense strand comprises one or two inverted abasic residues.
[0246] 15. An RNAi agent for inhibiting expression of a SARS-CoV-2 viral genome, wherein the RNAi agent is comprised of a sense strand and an antisense strand that form a duplex having the structure of any one of the duplexes in Table 7A-2, Table 7B-2, Table 8B, Table 9B, or Table 10B.
[0247] 16. The RNAi agent of embodiment 1 or embodiment 6, comprising an antisense strand that comprises, consists of, or consists essentially of a modified nucleotide sequence that differs by 0 or 1 nucleotides from one of the following nucleotide sequences (5′→3′):

| (SEQ ID NO: 160) | |
|---|---|
| | cPrpusUfsasgUfaGfgUfauAfaCfcAfcagcsa; |
| (SEQ ID NO: 146) | |
| | cPrpusUfsasguaGfguauAfaCfcAfcagcsa; |
| (SEQ ID NO: 163) | |
| | cPrpusUfaguaGfguauAfaCfcAfcagcsa; |
| | or |
| (SEQ ID NO: 140) | |
| | usUfsasguaGfguauAfaCfcAfcagcsa; |

[0248] wherein a represents 2′-O-methyl adenosine, c represents 2′-O-methyl cytidine, g represents 2′-O-methyl guanosine, and u represents 2′-O-methyl uridine; Af, represents 2′-fluoro adenosine, Cf represents 2′-fluoro cytidine, Gf represents 2′-fluoro guanosine, and Uf represents 2′-fluoro uridine; cPrpu represents a 5′-cyclopropyl phosphonate-2′-O-methyl uridine; s represents a phosphorothioate linkage; and wherein all or substantially all of the nucleotides on the sense strand are modified nucleotides.
[0249] 17. The RNAi agent of embodiment 1, wherein the sense strand comprises, consists of, or consists essentially of a modified nucleotide sequence that differs by 0 or 1 nucleotides from one of the following nucleotide sequences (5′→3′):

| (SEQ ID NO: 290) | |
|---|---|
| | usgcuguggUfuAfuaccuacuaa; |
| | or |
| (SEQ ID NO: 282) | |
| | usgcuguggUfUfAfuaccuacuaa, |

[0250] wherein a represents 2′-O-methyl adenosine, c represents 2′-O-methyl cytidine, g represents 2′-O-methyl guanosine, and u represents 2′-O-methyl uridine; Af, represents 2′-fluoro adenosine, Cf represents 2′-fluoro cytidine, Gf represents 2′-fluoro guanosine, and Uf represents 2′-fluoro uridine; s represents a phosphorothioate linkage; and wherein all or substantially all of the nucleotides on the antisense strand are modified nucleotides.
[0251] 18. The RNAi agent of any one of embodiments 16-17, wherein the sense strand further includes inverted abasic residues at the 3′ terminal end of the nucleotide sequence, at the 5′ end of the nucleotide sequence, or at both.
[0252] 19. The RNAi agent of any one of embodiments 1-18, wherein the RNAi agent is linked to a targeting ligand.
[0253] 20. The RNAi agent of embodiment 19, wherein the targeting ligand has affinity for a cell receptor expressed on an epithelial cell.
[0254] 21. The RNAi agent of embodiment 20, wherein the targeting ligand comprises an integrin targeting ligand.
[0255] 22. The RNAi agent of embodiment 21, wherein the integrin targeting ligand is an αvβ6 integrin targeting ligand.
[0256] 23. The RNAi agent of embodiment 22, wherein the targeting ligand comprises the structure:

[chemical structure]

or a pharmaceutically acceptable salt thereof, or

[chemical structure]

or a pharmaceutically acceptable salt thereof,
[0257] wherein [symbol] indicates the point of connection to the RNAi agent.
[0258] 24. The RNAi agent of any one of embodiments 19-23, wherein the targeting ligand has a structure selected from the group consisting of:

[chemical structure]

[chemical structure]

[chemical structure]

[chemical structure]

[chemical structure]

[chemical structure]

[chemical structure]

[chemical structure]

[chemical structure]

[0259] wherein [symbol] indicates the point of connection to the RNAi agent.
[0260] 25. The RNAi agent of embodiment 24, wherein RNAi agent is conjugated to a targeting ligand having the following structure:

[chemical structure]

[0261] 26. The RNAi agent of any one of embodiments 19-25, wherein the targeting ligand is conjugated to the sense strand.
[0262] 27. The RNAi agent of embodiment 26, wherein the targeting ligand is conjugated to the 5′ terminal end of the sense strand.
[0263] 28. The RNAi agent of any one of embodiments 1-27, wherein the RNAi agent is a pharmaceutically acceptable salt.
[0264] 29. The RNAi agent of any one of embodiments 1-28, wherein the RNAi agent is a sodium salt.
[0265] 30. A composition comprising the RNAi agent of any one of embodiments 1-29, wherein the composition further comprises a pharmaceutically acceptable excipient.
[0266] 31. The composition of embodiment 30, further comprising a second RNAi agent capable of inhibiting the expression of a coronavirus (CoV) genome.
[0267] 32. The composition of any one of embodiments 30-31, further comprising one or more additional therapeutics.
[0268] 33. The composition of any one of embodiments 30-32, wherein the composition is formulated for administration by inhalation.
[0269] 34. The composition of embodiment 33, wherein the composition is delivered by a metered-dose inhaler, jet nebulizer, vibrating mesh nebulizer, or soft mist inhaler.
[0270] 35. The composition of any of embodiments 30-34, wherein the RNAi agent is a sodium salt.
[0271] 36. The composition of any of embodiments 30-35, wherein the pharmaceutically acceptable excipient is water for injection.
[0272] 37. The composition of any of embodiments 30-35, wherein the pharmaceutically acceptable excipient is a buffered saline solution.
[0273] 38. A method for inhibiting a coronavirus (CoV) genome in a cell, the method comprising introducing into a cell an effective amount of an RNAi agent of any one of embodiments 1-29 or the composition of any one of embodiments 30-37.
[0274] 39. The method of embodiment 38, wherein the cell is within a subject.
[0275] 40. The method of embodiment 39, wherein the subject is a human subject.
[0276] 41. The method of any one of embodiments 38-40, wherein following the administration of the RNAi agent the CoV genome expression is inhibited by at least about 30%.
[0277] 42. A method of treating one or more symptoms or diseases associated with coronavirus (CoV) infection, the method comprising administering to a human subject in need thereof a therapeutically effective amount of the composition of any one of embodiments 30-37.
[0278] 43. The method of embodiment 42, wherein the disease is a respiratory disease.
[0279] 44. The method of embodiment 43, wherein the respiratory disease is pulmonary inflammation.
[0280] 45. The method of embodiment 42, wherein the disease is COVID-19.
[0281] 46. The method of embodiment 42, wherein the symptoms are caused by SARS-CoV-2 viral infection.
[0282] 47. The method of any one of embodiments 38-46, wherein the RNAi agent is administered at a deposited dose of about 0.01 mg/kg to about 5.0 mg/kg of body weight of the subject.
[0283] 48. The method of any one of embodiments 38-47, wherein the RNAi agent is administered at a deposited dose of about 0.03 mg/kg to about 2.0 mg/kg of body weight of the subject.
[0284] 49. The method of any one of embodiments 38-48, wherein the RNAi agent is administered in two or more doses.
[0285] 50. Use of the RNAi agent of any one of embodiments 1-29, for the treatment of a disease, disorder, or symptom that is caused by coronavirus (CoV) infection, preferably wherein the disease, disorder, or symptom can be mediated at least in part by a reduction in SARS-CoV-2 activity and/or SARS-CoV-2 viral genome expression.
[0286] 51. Use of the composition according to any one of embodiments 30-37, for the treatment of a disease, disorder, or symptom that is caused by coronavirus (CoV) infection, preferably wherein the disease, disorder, or symptom can be mediated at least in part by a reduction in SARS-CoV-2 activity and/or SARS-CoV-2 viral genome expression.
[0287] 52. Use of the composition according to any one of embodiments 30-37, for the manufacture of a medicament for treatment of a disease, disorder, or symptom that is caused by coronavirus (CoV) infection, preferably wherein the disease, disorder, or symptom can be mediated at least in part by a reduction in SARS-CoV-2 activity and/or SARS-CoV-2 viral genome expression.
[0288] 53. The use of any one of embodiments 50-52, wherein the disease is pulmonary inflammation.
[0289] 54. A method of making an RNAi agent of any one of embodiments 1-29, comprising annealing a sense strand and an antisense strand to form a double-stranded ribonucleic acid molecule.
[0290] 55. The method of embodiment 54, wherein the sense strand comprises a targeting ligand.
[0291] 56. The method of embodiment 55, comprising conjugating a targeting ligand to the sense strand.

[0292] The above provided embodiments and items are now illustrated with the following, non-limiting examples.

### EXAMPLES

### Example 1. Synthesis of CoV RNAi Agents

[0293] CoV RNAi agent duplexes disclosed herein were synthesized in accordance with the following:

[0294] A. Synthesis. The sense and antisense strands of the CoV RNAi agents were synthesized according to phosphoramidite technology on solid phase used in oligonucleotide synthesis. Depending on the scale, a MerMade96E® (Bioautomation), a MerMadel2® (Bioautomation), or an OP Pilot 100 (GE Healthcare) was used. Syntheses were performed on a solid support made of controlled pore glass (CPG, 500 Å or 600 Å, obtained from Prime Synthesis, Aston, PA, USA). All RNA and 2′-modified RNA phosphoramidites were purchased from Thermo Fisher Scientific (Milwaukee, WI, USA). Specifically, the 2′-O-methyl phosphoramidites that were used included the following: (5′-O-dimethoxytrityl-N⁶-(benzoyl)-2′-O-methyl-adenosine-3′-O-(2-cyanoethyl-N,N-diisopropylamino) phosphoramidite, 5′-O-dimethoxy-trityl-N⁴-(acetyl)-2′-O-methyl-cytidine-3′-O-(2-cyanoethyl-N,N-diisopropyl-amino) phosphoramidite, (5′-O-dimethoxytrityl-N²-(isobutyryl)-2′-O-methyl-guanosine-3′-O-(2-cyanoethyl-N,N-diisopropylamino) phosphoramidite, and 5′-O-dimethoxytrityl-2′-O-methyl-uridine-3′-O-(2-cyanoethyl-N,N-diisopropylamino) phosphoramidite. The 2′-deoxy-2′-fluoro-phosphoramidites carried the same protecting groups as the 2′-O-methyl RNA amidites. 5′-dimethoxytrityl-2′-O-methyl-inosine-3′-O-(2-cyanoethyl-N,N-diisopropylamino) phosphoramidites were purchased from Glen Research (Virginia). The inverted abasic (3′-O-dimethoxytrityl-2′-deoxyribose-5′-O-(2-cyanoethyl-N,N-diisopropylamino) phosphoramidites were purchased from ChemGenes (Wilmington, MA, USA). The following UNA phosphoramidites were used: 5′-(4,4′-Dimethoxytrityl)-N6-(benzoyl)-2′,3′-seco-adenosine, 2′-benzoyl-3′-[(2-cyanoethyl)-(N,N-diisopropyl)]-phosphoramidite, 5′-(4,4′-Dimethoxytrityl)-N-acetyl-2′,3′-seco-cytosine, 2′-benzoyl-3′-[(2-cyanoethyl)-(N,N-diiso-propyl)]-phosphoramidite, 5′-(4,4′-Dimethoxytrityl)-N-isobutyryl-2′,3′-seco-guanosine, 2′-benzoyl-3′-[(2-cyanoethyl)-(N,N-diisopropyl)]-phosphoramidite, and 5′-(4,4′-Dimethoxy-trityl)-2′,3′-seco-uridine, 2′-benzoyl-3′-[(2-cyanoethyl)-(N,N-diiso-propyl)]-phosphoramidite. TFA aminolink phosphoramidites were also commercially purchased (ThermoFisher). Linker L6 was purchased as propargyl-PEG5-NHS from BroadPharm (catalog #BP-20907) and coupled to the NH2-C6 group from an aminolink phosphoramidite to form -L6-C6-, using standard coupling conditions. The linker Alk-cyHex was similarly commercially purchased from Lumiprobe (alkyne phosphoramidite, 5′-terminal) as a propargyl-containing compound phosphoramidite compound to form the linker -Alk-cyHex-. In each case, phosphorothioate linkages were introduced as specified using the conditions set forth herein. The cyclopropyl phosphonate phosphoramidites were synthesized in accordance with International Patent Application Publication No. WO 2017/214112 (see also Altenhofer et. al., Chem. Communications (Royal Soc. Chem.), 57(55):6808-6811 (July 2021)). The (NAG37)s targeting ligand phosphoramidite compounds used in synthesizing the RNAi agents disclosed herein for performing certain SEAP studies described below were synthesized in accordance with International Patent Application Publication No. WO 2018/044350 to Arrowhead Pharmaceuticals, Inc.; the targeting ligand-containing phosphoramidite compounds were added during the solid phase oligonucleotide synthesis process described herein.

[0295] Tri-alkyne-containing phosphoramidites were dissolved in anhydrous dichloromethane or anhydrous acetonitrile (50 mM), while all other amidites were dissolved in anhydrous acetonitrile (50 mM) and molecular sieves (3 Å) were added. 5-Benzylthio-1H-tetrazole (BTT, 250 mM in acetonitrile) or 5-Ethylthio-1H-tetrazole (ETT, 250 mM in acetonitrile) was used as activator solution. Coupling times were 10 minutes (RNA), 90 seconds (2′ O-Me), and 60 seconds (2′ F). In order to introduce phosphorothioate linkages, a 100 mM solution of 3-phenyl 1,2,4-dithiazoline-5-one (POS, obtained from PolyOrg, Inc., Leominster, MA, USA) in anhydrous acetonitrile was employed.

[0296] Alternatively, tri-alkyne moieties were introduced post-synthetically (see section E, below). For this route, the sense strand was functionalized with a 5′ and/or 3′ terminal nucleotide containing a primary amine. TFA aminolink phosphoramidite was dissolved in anhydrous acetonitrile (50 mM) and molecular sieves (3 Å) were added. 5-Benzylthio-1H-tetrazole (BTT, 250 mM in acetonitrile) or 5-Ethylthio-1H-tetrazole (ETT, 250 mM in acetonitrile) was used as activator solution. Coupling times were 10 minutes (RNA), 90 seconds (2′ O-Me), and 60 seconds (2′ F). In order to introduce phosphorothioate linkages, a 100 mM solution of 3-phenyl 1,2,4-dithiazoline-5-one (POS, obtained from PolyOrg, Inc., Leominster, MA, USA) in anhydrous acetonitrile was employed.

[0297] B. Cleavage and deprotection of support bound oligomer. After finalization of the solid phase synthesis, the dried solid support was treated with a 1:1 volume solution of 40 wt. %0 methylamine in water and 28% to 31% ammonium hydroxide solution (Aldrich) for 1.5 hours at 30° C. The solution was evaporated and the solid residue was reconstituted in water (see below).

[0298] C. Purification. Crude oligomers were purified by anionic exchange HPLC using a TSKgel SuperQ-5PW 13 μm column and Shimadzu LC-8 system. Buffer A was 20 mM Tris, 5 mM EDTA, pH 9.0 and contained 20% Acetonitrile and buffer B was the same as buffer A with the addition of 1.5 M sodium chloride. UV traces at 260 nm were recorded. Appropriate fractions were pooled then run on size exclusion HPLC using a GE Healthcare XK 16/40 column packed with Sephadex G-25 fine with a running buffer of 100 mM ammonium bicarbonate, pH 6.7 and 20% Acetonitrile or filtered water. Alternatively, pooled fractions were desalted and exchanged into an appropriate buffer or solvent system via tangential flow filtration.

[0299] D. Annealing. Complementary strands were mixed by combining equimolar RNA solutions (sense and antisense) in 1×PBS (Phosphate-Buffered Saline, 1×, Corning, Cellgro) to form the RNAi agents. Some RNAi agents were lyophilized and stored at −15 to −25° C. Duplex concentration was determined by measuring the solution absorbance on a UV-Vis spectrometer in 1×PBS. The solution absorbance at 260 nm was then multiplied by a conversion factor (0.050 mg/(mL-cm)) and the dilution factor to determine the duplex concentration.

[0300] E. Conjugation of Tri-alkyne linker. In some embodiments a tri-alkyne linker is conjugated to the sense strand of the RNAi agent on resin as a phosphoramidite (see Example 1G for the synthesis of an example tri-alkyne linker phosphoramidite and Example TA for the conjugation of the phosphoramidite). In other embodiments, a tri-alkyne linker may be conjugated to the sense strand following cleavage from the resin, described as follows: either prior to or after annealing, in some embodiments, the 5′ or 3′ amine functionalized sense strand is conjugated to a tri-alkyne linker. An example tri-alkyne linker structure that can be used in forming the constructs disclosed herein is as follows:

[chemical structure]

To conjugate the tri-alkyne linker to the annealed duplex, amine-functionalized duplex was dissolved in 90% DMSO/10% H₂O, at ˜50-70 mg/mL. 40 equivalents triethylamine was added, followed by 3 equivalents tri-alkyne-PNP. Once complete, the conjugate was precipitated twice in a solvent system of 1× phosphate buffered saline/acetonitrile (1:14 ratio), and dried.

### F. Synthesis of Targeting Ligand SM6.1

### ((S)-3-(4-(4-((14-azido-3,6,9,12-tetraoxatetradecyl)oxy)naphthalen-1-yl)phenyl)-3-(2-(4-((4-methylpyridin-2-yl)amino)butanamido)acetamido)propanoic acid)

[chemical structure]

[0301] Compound 5 (tert-Butyl(4-methylpyridin-2-yl)carbamate) (0.501 g, 2.406 mmol, 1 equiv.) was dissolved in DMF (17 mL). To the mixture was added NaH (0.116 mg, 3.01 mmol, 1.25 eq, 60% dispersion in oil) The mixture stirred for 10 min before adding Compound 20 (Ethyl 4-Bromobutyrate (0.745 g, 3.82 mmol, 0.547 mL)) (Sigma 167118). After 3 hours the reaction was quenched with ethanol (18 mL) and concentrated. The concentrate was dissolved in DCM (50 mL) and washed with saturated aq. NaCl solution (1×50 mL), dried over Na₂SO₄, filtered and concentrated. The product was purified on silica column, gradient 0-5% Methanol in DCM.

[chemical structure]

[0302] Compound 21 was dissolved (0.80 g, 2.378 mmol) in 100 mL of Acetone:0.1 M NaOH [1:1]. The reaction was monitored by TLC (5% ethyl acetate in hexane). The organics were concentrated away, and the residue was acidified to pH 3-4 with 0.3 M Citric Acid (40 mL). The product was extracted with DCM (3×75 mL). The organics were pooled, dried over Na₂SO₄, filtered and concentrated. The product was used without further purification.

[chemical structure]

[0303] To a solution of Compound 22 (1.1 g, 3.95 mmol, 1 equiv.), Compound 45 (595 mg, 4.74 mmol, 1.2 equiv.), and TBTU (1.52 g, 4.74 mmol, 1.2 equiv.) in anhydrous DMF (10 mL) was added diisopropylethylamine (2.06 mL, 11.85 mmol, 3 equiv.) at 0° C. The reaction mixture was warmed to room temperature and stirred 3 hours. The reaction was quenched by saturated NaHCO₃ solution (10 mL). The aqueous phase was extracted with ethyl acetate (3×10 mL) and the organic phase was combined, dried over anhydrous Na₂SO₄, and concentrated. The product was separated by CombiFlash® using silica gel as the stationary phase. LC-MS: calculated [M+H]+ 366.20, found 367.

[chemical structure]

[0304] To a solution of compound 61 (2 g, 8.96 mmol, 1 equiv.), and compound 62 (2.13 mL, 17.93 mmol, 2 equiv.) in anhydrous DMF (10 mL) was added K₂CO₃ (2.48 g, 17.93 mmol, 2 equiv.) at 0° C. The reaction mixture was warmed to room temperature and stirred overnight. The reaction was quenched by water (10 mL). The aqueous phase was extracted with ethyl acetate (3×10 mL) and the organic phase was combined, dried over anhydrous Na₂SO₄, and concentrated. The product was separated by CombiFlash® using silica gel as the stationary phase.

[chemical structure]

[0305] To a solution of compound 60 (1.77 g, 4.84 mmol, 1 equiv.) in THF (5 mL) and H₂O (5 mL) was added lithium hydroxide monohydrate (0.61 g, 14.53 mmol, 3 equiv.) portion-wise at 0° C. The reaction mixture was warmed to room temperature. After stirring at room temperature for 3 hours, the reaction mixture was acidified by HCl (6 N) to pH 3.0. The aqueous phase was extracted with ethyl acetate (3×20 mL) and the organic layer was combined, dried over Na₂SO₄, and concentrated. LC-MS: calculated [M+H]+ 352.18, found 352.

[chemical structure]

[0306] To a solution of compound 63 (1.88 g, 6.0 mmol, 1.0 equiv.) in anhydrous THF (20 mL) was added n-BuLi in hexane (3.6 mL, 9.0 mmol, 1.5 equiv.) drop-wise at −78° C. The reaction was kept at −78° C. for another 1 hour. Triisopropylborate (2.08 mL, 9.0 mmol, 1.5 equiv.) was then added into the mixture at −78° C. The reaction was then warmed up to room temperature and stirred for another 1 hour. The reaction was quenched by saturated NH4Cl solution (20 mL) and the pH was adjusted to 3. The aqueous phase was extracted with EtOAc (3×20 mL) and the organic phase was combined, dried over Na₂SO₄, and concentrated.

[chemical structure]

[0307] Compound 12 (300 mg, 0.837 mmol, 1.0 equiv.), Compound 65 (349 mg, 1.256 mmol, 1.5 equiv.), XPhos Pd G2 (13 mg, 0.0167 mmol, 0.02 equiv.), and K₃PO₄ (355 mg, 1.675 mmol, 2.0 equiv.) were mixed in a round-bottom flask. The flask was sealed with a screw-cap septum, and then evacuated and backfilled with nitrogen (this process was repeated a total of 3 times). Then, THF (8 mL) and water (2 mL) were added via syringe. The mixture was bubbled with nitrogen for 20 min and the reaction was kept at room temperature for overnight. The reaction was quenched with water (10 mL), and the aqueous phase was extracted with ethyl acetate (3×10 mL). The organic phase was dried over Na₂SO₄, concentrated, and purified via CombiFlash® using silica gel as the stationary phase and was eluted with 15% EtOAc in hexane. LC-MS: calculated [M+H]+ 512.24, found 512.56.

[chemical structure]

[0308] Compound 66 (858 mg, 1.677 mmol, 1.0 equiv.) was cooled by ice bath. HCl in dioxane (8.4 mL, 33.54 mmol, 20 equiv.) was added into the flask. The reaction was warmed to room temperature and stirred for another 1 hr. The solvent was removed by rotary evaporator and the product was directly used without further purification. LC-MS: calculated [M+H]+ 412.18, found 412.46.

[chemical structure]

[0309] To a solution of compound 64 (500 mg, 1.423 mmol, 1 equiv.), compound 67 (669 mg, 1.494 mmol, 1.05 equiv.), and TBTU (548 mg, 0.492 mmol, 1.2 equiv.) in anhydrous DMF (15 mL) was added diisopropylethylamine (0.744 mL, 4.268 mmol, 3 equiv.) at 0° C. The reaction mixture was warmed to room temperature and stirred for another 1 hr. The reaction was quenched by saturated NaHCO₃ aqueous solution (10 mL) and the product was extracted with ethyl acetate (3×20 mL). The organic phase was combined, dried over Na₂SO₄, and concentrated. The product was purified by CombiFlash® using silica gel as the stationary phase and was eluted with 3-4% methanol in DCM. The yield was 96.23%. LC-MS: calculated [M+H]+ 745.35, found 746.08.

[chemical structure]

[0310] To a solution of compound 68 (1.02 g, 1.369 mmol, 1 equiv.) in ethyl acetate (10 mL) was added 10% Pd/C (0.15 g, 50% H₂O) at room temperature. The reaction mixture was warmed to room temperature and the reaction was monitored by LC-MS. The reaction was kept at room temperature overnight. The solids were filtered through Celite® and the solvent was removed by rotary evaporator. The product was directly used without further purification. LC-MS: [M+H]+ 655.31, found 655.87.

[chemical structure]

[0311] To a solution of compound 69 (100 mg, 0.152 mmol, 1 equiv.) and azido-PEG₅-OTs (128 mg, 0.305 mmol, 2 equiv.) in anhydrous DMF (2 mL) was added K₂C03 (42 mg, 0.305 mmol, 2 equiv.) at 0° C. The reaction mixture was stirred for 6 hours at 80° C. The reaction was quenched by saturated NaHCO₃ solution and the aqueous layer was extracted with ethyl acetate (3×10 mL). The organic phase was combined, dried over Na₂SO₄, and concentrated. LC-MS: calculated [M+H]+ 900.40, found 901.46.

[chemical structure]

[0312] To a solution of compound 72 (59 mg, 0.0656 mmol, 1.0 equiv.) in THF (2 mL) and water (2 mL) was added lithium hydroxide (5 mg, 0.197 mmol, 3.0 equiv.) at room temperature. The mixture was stirred at room temperature for another 1 hr. The pH was adjusted to 3.0 by HCl (6N) and the aqueous phase was extracted with EtOAc (3×10 mL). The organic phase was combined, dried over Na₂SO₄, and concentrated. TFA (0.5 mL) and DCM (0.5 mL) was added into the residue and the mixture was stirred at room temperature for another 3 hr. The solvent was removed by rotary evaporator. LC-MS: calculated [M+H]+ 786.37, found 786.95.

### G. Synthesis of TriAlk 14

[0313] TriAlk14 and (TriAlk14)s as shown in Table 11, above, may be synthesized using the synthetic route shown below. Compound 14 may be added to the sense strand as a phosphoramidite using standard oligonucleotide synthesis techniques, or compound 22 may be conjugated to the sense strand comprising an amine in an amide coupling reaction.

[chemical structure]

[0314] To a 3-L jacketed reactor was added 500 mL DCM and 4 (75.0 g, 0.16 mol). The internal temperature of the reaction was cooled to 0° C. and TBTU (170.0 g, 0.53 mol) was added. The suspension was then treated with the amine 5 (75.5 g, 0.53 mol) dropwise keeping the internal temperature less than 5° C. The reaction was then treated with DIPEA (72.3 g, 0.56 mol) slowly, keeping the internal temperature less than 5° C. After the addition was complete, the reaction was warmed up to 23° C. over 1 hour, and allowed to stir for 3 hours. A 10% kicker charge of all three reagents were added and allowed to stir an additional 3 hours. The reaction was deemed complete when <1% of 4 remained. The reaction mixture was washed with saturated ammonium chloride solution (2×500 mL) and once with saturated sodium bicarbonate solution (500 mL). The organic layer was then dried over sodium sulfate and concentrated to an oil. The mass of the crude oil was 188 g which contained 72% 6 by QNMR. The crude oil was carried to the next step. Calculated mass for C₄₆H₆₀N₄O₁₁=845.0 m/z. Found [M+H]=846.0.

[chemical structure]

[0315] The 121.2 g of crude oil containing 72 wt % compound 6 (86.0 g, 0.10 mol) was dissolved in DMF (344 mL) and treated with TEA (86 mL, 20 v/v %), keeping the internal temperature below 23° C. The formation of dibenzofulvene (DBF) relative to the consumption of Fmoc-amine 6 was monitored via HPLC method 1 (FIG. 2) and the reaction was complete within 10 hours. To the solution was added glutaric anhydride (12.8 g, 0.11 mol) and the intermediate amine 7 was converted to compound 8 within 2 hours. Upon completion, the DMF and TEA were removed at 30° C. under reduced pressure resulting in 100 g of a crude oil. Due to the high solubility of compound 7 in water, an aqueous workup could not be used, and chromatography is the only way to remove DBF, TMU, and glutaric anhydride. The crude oil (75 g) was purified on a Teledyne ISCO Combi-Flash® purification system in three portions. The crude oil (25 g) was loaded onto a 330 g silica column and eluted from 0-20% methanol/DCM over 30 minutes resulting in 42 g of compound 8 (54% yield over 3 steps). Calculated mass for C₃₆H₅₅N₄O₁₂=736.4 m/z. Found [M+H]=737.0.

[chemical structure]

[0316] Compound 8 (42.0 g, 0.057 mol) was co-stripped with 10 volumes of acetonitrile prior to use to remove any residual methanol from chromatography solvents. The oil was redissolved in DMF (210 mL) and cooled to 0° C. The solution was treated with 4-nitrophenol (8.7 g, 0.063 moL) followed by EDC-hydrochloride (12.0 g, 0.063 mol) and found to reach completion within 10 hours. The solution was cooled to 0° C. and 10 volumes ethyl acetate was added followed by 10 volumes saturated ammonium chloride solution, keeping the internal temperature below 15° C. The layers were allowed to separate and the ethyl acetate layer was washed with brine. The combined aqueous layers were extracted twice with 5 volumes ethyl acetate. The combined organic layers were dried over sodium sulfate and concentrated to an oil. The crude oil (55 g) was purified on a Teledyne ISCO Combi-Flash® purification system in three portions. The crude oil (25 g) was loaded onto a 330 g silica column and eluted from 0-10% methanol/DCM over 30 minutes resulting in 22 g of pure 9 (Compound 22) (50% yield). Calculated mass for C42159N5014=857.4 m/z. Found [M+H]=858.0.

[chemical structure]

[0317] A solution of ester 9 (49.0 g, 57.1 mmol) and 6-amino-1-hexanol (7.36 g, 6.28 mmol) in dichloromethane (3 volumes) was treated with triethylamine (11.56 g, 111.4 mmol) dropwise. The reaction was monitored by observing the disappearance of compound 9 on HPLC Method 1 and was found to be complete in 10 minutes. The crude reaction mixture was diluted with 5 volumes dichloromethane and washed with saturated ammonium chloride (5 volumes) and brine (5 volumes). The organic layer was dried over sodium sulfate and concentrated to an oil. The crude oil was purified on a Teledyne ISCO Combi-Flash® purification system using a 330 g silica column. The 4-nitrophenol was eluted with 100% ethyl acetate and 10 was flushed from the column using 20% methanol/DCM resulting in a colorless oil (39 g, 81% yield). Calculated mass for C₄₂H₆₉N₅O₁₂=836.0 m/z. Found [M+H]=837.0.

[chemical structure]

[0318] Alcohol 10 was co-stripped twice with 10 volumes of acetonitrile to remove any residual methanol from chromatography solvents and once more with dry dichloromethane (KF <60 ppm) to remove trace water. The alcohol 10 (2.30 g, 2.8 mmol) was dissolved in 5 volumes dry dichloromethane (KF<50 ppm) and treated with diisopropylammonium tetrazolide (188 mg, 1.1 mmol). The solution was cooled to 0° C. and treated with 2-cyanoethyl N,N,N′,N′-tetraisopropylphosphoramidite (1.00 g, 3.3 mmol) dropwise. The solution was removed from ice-bath and stirred at 20° C. The reaction was found to be complete within 3-6 hours. The reaction mixture was cooled to 0° C. and treated with 10 volumes of a 1:1 solution of saturated ammonium bicarbonate/brine and then warmed to ambient over 1 minute and allowed to stir an additional 3 minutes at 20° C. The biphasic mixture was transferred to a separatory funnel and 10 volumes of dichloromethane was added. The organic layer was separated and washed with 10 volumes of saturated sodium bicarbonate solution to hydrolyze unreacted bis-phosphorous reagent. The organic layer was dried over sodium sulfate and concentrated to an oil resulting in 3.08 g of 94 wt % Compound 14. Calculated mass for C₅₁H₈₆N₇O₁₃P=1035.6 m/z. Found [M+H]=1036.

[0319] H. Conjugation of Targeting Ligands. Either prior to or after annealing, the 5′ or 3′ tridentate alkyne functionalized sense strand is conjugated to targeting ligands. The following example describes the conjugation of targeting ligands to the annealed duplex: Stock solutions of 0.5M Tris(3-hydroxypropyltriazolylmethyl)amine (THPTA), 0.5M of Cu(II) sulfate pentahydrate (Cu(II)SO₄·5H₂O) and 2M solution of sodium ascorbate were prepared in deionized water. A 75 mg/mL solution in DMSO of targeting ligand was made. In a 1.5 mL centrifuge tube containing tri-alkyne functionalized duplex (3 mg, 75 μL, 40 mg/mL in deionized water, ˜15,000 g/mol), 25 μL of 1M Hepes pH 8.5 buffer is added. After vortexing, 35 μL of DMSO was added and the solution is vortexed. Targeting ligand was added to the reaction (6 equivalents/duplex, 2 equivalents/alkyne, ˜15 μL) and the solution is vortexed. Using pH paper, pH was checked and confirmed to be pH ˜8. In a separate 1.5 mL centrifuge tube, 50 μL of 0.5M THPTA was mixed with 10 uL of 0.5M Cu(II)SO₄·5H₂O, vortexed, and incubated at room temp for 5 min. After 5 min, THPTA/Cu solution (7.2 μL, 6 equivalents 5:1 THPTA:Cu) was added to the reaction vial, and vortexed. Immediately afterwards, 2M ascorbate (5 μL, 50 equivalents per duplex, 16.7 per alkyne) was added to the reaction vial and vortexed. Once the reaction was complete (typically complete in 0.5-1 h), the reaction was immediately purified by non-denaturing anion exchange chromatography.

### Example 2. SARS-CoV-2-SEAP Mouse Model

[0320] To assess the potency of the RNAi agents, a SARS-CoV-2-SEAP mouse model was used. Six to eight week old female C57BL/6 albino mice were transiently transfected in vivo with plasmid by hydrodynamic tail vein injection, administered at least 15 days prior to administration of an CoV RNAi agent or control. The plasmid contains segments of the SARS-CoV-2 genome sequence (GenBank NC_045512.2 (SEQ ID NO: 1)) inserted into the 3′ UTR of the SEAP (secreted human placental alkaline phosphatase) reporter gene. 10 μg to 50 μg of the plasmid containing the SARS-CoV-2 genome sequence in Ringer's Solution in a total volume of 10% of the animal's body weight was injected into mice via the tail vein to create SARS-CoV-2-SEAP model mice. The solution was injected through a 27-gauge needle in 5-7 seconds as previously described (Zhang G et al., “High levels of foreign gene expression in hepatocytes after tail vein injection of naked plasmid DNA.” Human Gene Therapy 1999 Vol. 10, p 1735-1737). Inhibition of expression of SARS-CoV-2 sequences by a CoV RNAi agent results in concomitant inhibition of SEAP expression, which is measured by the Phospha-Light™ SEAP Reporter Gene Assay System (Invitrogen). Prior to treatment, SEAP expression levels in serum were measured and the mice were grouped according to average SEAP levels.

[0321] Analyses: SEAP levels may be measured at various times, both before and after administration of CoV RNAi agents.
[0322] i) Serum collection: Mice were anesthetized with 2-3% isoflurane and blood samples were collected from the submandibular area into serum separation tubes (Sarstedt AG & Co., Nümbrecht, Germany). Blood was allowed to coagulate at ambient temperature for 20 min. The tubes were centrifuged at 8,000×g for 3 min to separate the serum and stored at 4° C.
[0323] ii) Serum SEAP levels: Serum was collected and measured by the Phospha-Light™ SEAP Reporter Gene Assay System (Invitrogen) according to the manufacturer's instructions. Serum SEAP levels for each animal was normalized to the control group of mice injected with saline in order to account for the non-treatment related decline in SARS-CoV-2 sequence expression with this model. First, the SEAP level for each animal at a time point was divided by the pre-treatment level of expression in that animal (“pre-treatment”) in order to determine the ratio of expression “normalized to pre-treatment”. Expression at a specific time point was then normalized to the control group by dividing the “normalized to pre-treatment” ratio for an individual animal by the average “normalized to pre-treatment” ratio of all mice in the normal saline control group. Alternatively, in some Examples set forth herein, the serum SEAP levels for each animal were assessed by normalizing to pre-treatment levels only.

### Example 3. In Vivo Testing of CoV RNAi Agents in SARS-CoV-2-SEAP Mice

[0324] The SARS-CoV-2-SEAP mouse model described in Example 2, above, was used. At day 1, four (n=4) female C57bl/6 albino mice were given a single subcutaneous (SQ) injection of 200 μl per 20 g body weight containing either 2.0 mg/kg (mpk) of an CoV RNAi agent or saline without an CoV RNAi agent to be used as a control, according to the following Table 12.

TABLE 12
CoV RNAi agent and Dosing for Example 3

| Group ID | Dosing Regimen |
|---|---|
| Group 1 (isotonic saline) | Single SQ injection on day 1 |
| Group 2 (2.0 mg/kg AD10297) | Single SQ injection on day 1 |
| Group 3 (2.0 mg/kg AD10295) | Single SQ injection on day 1 |
| Group 4 (2.0 mg/kg AD10293) | Single SQ injection on day 1 |
| Group 5 (2.0 mg/kg AD10294) | Single SQ injection on day 1 |
| Group 6 (2.0 mg/kg AD10536) | Single SQ injection on day 1 |
| Group 7 (2.0 mg/kg AD10537) | Single SQ injection on day 1 |
| Group 8 (2.0 mg/kg AD10538) | Single SQ injection on day 1 |
| Group 9 (2.0 mg/kg AD10539) | Single SQ injection on day 1 |
| Group 10 (2.0 mg/kg AD10540) | Single SQ injection on day 1 |
| Group 11 (2.0 mg/kg AD10296) | Single SQ injection on day 1 |

[0325] Each of the CoV RNAi agents included N-acetyl-galactosamine targeting ligands ((NAG37)s) conjugated to the 5′-terminal end of the sense strand, as shown in Tables 5, 7A, and 11 and were added as phosphoramidite compounds during the oligonucleotide synthesis process described above in Example 1.

[0326] The injections were performed between the skin and muscle (i.e. subcutaneous injections) into the loose skin over the neck and shoulder area. Four (4) mice in each group were tested (n=4). Serum was collected on day 8, day 15, day 22, and day 29, and SEAP expression levels were determined pursuant to the procedure set forth in Example 2, above. Data from the experiment are shown in the following Table 13, with Average SEAP reflecting the normalized average value of SEAP.

TABLE 13
Average SEAP normalized to pre-treatment and saline
control in SARS CoV-2 -SEAP mice from Example 3.

| | Day 8 | | Day 15 | |
|---|---|---|---|---|
| | Avg | Std Dev | Avg | Std Dev |
| Group ID | SEAP | (+/−) | SEAP | (+/−) |
| Group 1 (isotonic saline) | 1.000 | 0.156 | 1.000 | 0.143 |
| Group 2 (2.0 mg/kg AD10297) | 0.375 | 0.067 | 0.233 | 0.037 |
| Group 3 (2.0 mg/kg AD10295) | 0.416 | 0.193 | 0.295 | 0.111 |
| Group 4 (2.0 mg/kg AD10293) | 0.497 | 0.161 | 0.420 | 0.092 |
| Group 5 (2.0 mg/kg AD10294) | 0.461 | 0.099 | 0.395 | 0.142 |
| Group 6 (2.0 mg/kg AD10536) | 0.458 | 0.173 | 0.358 | 0.133 |
| Group 7 (2.0 mg/kg AD10537) | 0.385 | 0.087 | 0.229 | 0.039 |
| Group 8 (2.0 mg/kg AD10538) | 0.403 | 0.095 | 0.296 | 0.065 |
| Group 9 (2.0 mg/kg AD10539) | 0.436 | 0.015 | 0.313 | 0.081 |
| Group 10 (2.0 mg/kg AD10540) | 0.397 | 0.102 | 0.240 | 0.071 |
| Group 11 (2.0 mg/kg AD10296) | 0.378 | 0.089 | 0.270 | 0.079 |
| | Day 22 | | Day 29 | |
| | Avg | Std Dev | Avg | Std Dev |
| Group ID | SEAP | (+/−) | SEAP | (+/−) |
| Group 1 (isotonic saline) | 1.000 | 0.233 | 1.000 | 0.206 |
| Group 2 (2.0 mg/kg AD10297) | 0.235 | 0.072 | 0.365 | 0.133 |
| Group 3 (2.0 mg/kg AD10295) | 0.355 | 0.240 | 0.421 | 0.220 |
| Group 4 (2.0 mg/kg AD10293) | 0.508 | 0.164 | 0.770 | 0.184 |
| Group 5 (2.0 mg/kg AD10294) | 0.480 | 0.181 | 0.713 | 0.273 |
| Group 6 (2.0 mg/kg AD10536) | 0.402 | 0.152 | 0.473 | 0.207 |
| Group 7 (2.0 mg/kg AD10537) | 0.228 | 0.045 | 0.324 | 0.072 |
| Group 8 (2.0 mg/kg AD10538) | 0.273 | 0.070 | 0.437 | 0.163 |
| Group 9 (2.0 mg/kg AD10539) | 0.378 | 0.129 | 0.593 | 0.310 |
| Group 10 (2.0 mg/kg AD10540) | 0.263 | 0.088 | 0.378 | 0.113 |
| Group 11 (2.0 mg/kg AD10296) | 0.279 | 0.122 | 0.341 | 0.146 |

[0327] Each of the CoV RNAi agents in each of the dosing groups (i.e., Groups 2 through 11) showed reduction in SEAP as compared to the saline control (Group 1) across all measured time points, which as described herein, indicates inhibition of SARS-CoV-2 RNA in the SARS-CoV-2-SEAP mouse model. For example, at Day 22 the CoV RNAi agent of Group 7 (AD10537) showed reductions in SEAP of approximately 770 (0.228).

### Example 4. In Vivo Testing of CoV RNAi Agents in SARS-CoV-2-SEAP Mice

[0328] The SARS-CoV-2-SEAP mouse model described in Example 2, above, was used. At day 1. four (n=4) female C7bl/6 albino mice were given a single subcutaneous (SQ) injection of 200 per 20 g body weight containing either 2.0 mg/kg (mpk) of an CoV RNAi agent or saline without an CoV RNAi agent to be used as a control, according to the following Table 14.

TABLE 14
CoV RNAi agent and Dosing for Example 4

| Group ID | Dosing Regimen |
|---|---|
| Group 1 (isotonic saline) | Single SQ injection on day 1 |
| Group 2 (2.0 mg/kg AD10297) | Single SQ injection on day 1 |
| Group 3 (2.0 mg/kg AD10912) | Single SQ injection on day 1 |
| Group 4 (2.0 mg/kg AD10913) | Single SQ injection on day 1 |
| Group 5 (2.0 mg/kg AD10914) | Single SQ injection on day 1 |
| Group 6 (2.0 mg/kg AD10915) | Single SQ injection on day 1 |
| Group 7 (2.0 mg/kg AD10916) | Single SQ injection on day 1 |
| Group 8 (2.0 mg/kg AD10917) | Single SQ injection on day 1 |
| Group 9 (2.0 mg/kg AD10918) | Single SQ injection on day 1 |
| Group 10 (2.0 mg/kg AD10536) | Single SQ injection on day 1 |
| Group 11 (2.0 mg/kg AD10919) | Single SQ injection on day 1 |
| Group 12 (2.0 mg/kg AD10920) | Single SQ injection on day 1 |
| Group 13 (2.0 mg/kg AD10921) | Single SQ injection on day 1 |
| Group 14 (2.0 mg/kg AD10922) | Single SQ injection on day 1 |
| Group 15 (2.0 mg/kg AD10923) | Single SQ injection on day 1 |
| Group 16 (2.0 mg/kg AD10540) | Single SQ injection on day 1 |
| Group 17 (2.0 mg/kg AD10925) | Single SQ injection on day 1 |
| Group 18 (2.0 mg/kg AD10926) | Single SQ injection on day 1 |
| Group 19 (2.0 mg/kg AD10927) | Single SQ injection on day 1 |
| Group 20 (2.0 mg/kg AD10928) | Single SQ injection on day 1 |
| Group 21 (2.0 mg/kg AD10929) | Single SQ injection on day 1 |
| Group 22 (2.0 mg/kg AD10930) | Single SQ injection on day 1 |
| Group 23 (2.0 mg/kg AD10931) | Single SQ injection on day 1 |

[0329] Each of the CoV RNAi agents included N-acetyl-galactosamine targeting ligands ((NAG37)s) conjugated to the 5′-terminal end of the sense strand, as shown in Tables 5, 7A, and 11 and were added as phosphoramidite compounds during the oligonucleotide synthesis process described above in Example 1.

[0330] The injections were performed between the skin and muscle (i.e. subcutaneous injections) into the loose skin over the neck and shoulder area. Four (4) mice in each group were tested (n=4). Serum was collected on day 8, day 15, day 22, and day 29, and SEAP expression levels were determined pursuant to the procedure set forth in Example 2, above. Data from the experiment are shown in the following Table 15, with Average SEAP reflecting the normalized average value of SEAP.

TABLE 15
Average SEAP normalized to pre-treatment and saline
control in SARS-CoV-2 -SEAP mice from Example 4.

| | Day 8 | | Day 15 | |
|---|---|---|---|---|
| | Avg | Std Dev | Avg | Std Dev |
| Group ID | SEAP | (+/−) | SEAP | (+/−) |
| Group 1 (isotonic saline) | 1.000 | 0.205 | 1.000 | 0.183 |
| Group 2 (2.0 mg/kg AD10297) | 0.204 | 0.035 | 0.177 | 0.096 |
| Group 3 (2.0 mg/kg AD10912) | 0.193 | 0.020 | 0.151 | 0.039 |
| Group 4 (2.0 mg/kg AD10913) | 0.145 | 0.021 | 0.104 | 0.045 |
| Group 5 (2.0 mg/kg AD10914) | 0.164 | 0.043 | 0.100 | 0.045 |
| Group 6 (2.0 mg/kg AD10915) | 0.218 | 0.059 | 0.209 | 0.048 |
| Group 7 (2.0 mg/kg AD10916) | 0.184 | 0.029 | 0.141 | 0.030 |
| Group 8 (2.0 mg/kg AD10917) | 0.165 | 0.041 | 0.115 | 0.018 |
| Group 9 (2.0 mg/kg AD10918) | 0.137 | 0.021 | 0.076 | 0.025 |
| Group 10 (2.0 mg/kg AD10536) | 0.222 | 0.065 | 0.113 | 0.050 |
| Group 11 (2.0 mg/kg AD10919) | 0.194 | 0.060 | 0.124 | 0.015 |
| Group 12 (2.0 mg/kg AD10920) | 0.175 | 0.048 | 0.118 | 0.022 |
| Group 13 (2.0 mg/kg AD10921) | 0.174 | 0.029 | 0.066 | 0.032 |
| Group 14 (2.0 mg/kg AD10922) | 0.180 | 0.031 | 0.091 | 0.041 |
| Group 15 (2.0 mg/kg AD10923) | 0.147 | 0.040 | 0.150 | 0.070 |
| Group 16 (2.0 mg/kg AD10540) | 0.125 | 0.017 | 0.110 | 0.036 |
| Group 17 (2.0 mg/kg AD10925) | 0.228 | 0.063 | 0.192 | 0.044 |
| Group 18 (2.0 mg/kg AD10926) | 0.315 | 0.146 | 0.243 | 0.110 |
| Group 19 (2.0 mg/kg AD10927) | 0.293 | 0.022 | 0.221 | 0.070 |
| Group 20 (2.0 mg/kg AD10928) | 0.320 | 0.038 | 0.272 | 0.107 |
| Group 21 (2.0 mg/kg AD10929) | 0.428 | 0.035 | 0.301 | 0.070 |
| Group 22 (2.0 mg/kg AD10930) | 0.332 | 0.017 | 0.273 | 0.133 |
| Group 23 (2.0 mg/kg AD10931) | 0.248 | 0.069 | 0.229 | 0.026 |
| | Day 22 | | Day 29 | |
| | Avg | Std Dev | Avg | Std Dev |
| Group ID | SEAP | (+/−) | SEAP | (+/−) |
| Group 1 (isotonic saline) | 1.000 | 0.162 | 1.000 | 0.104 |
| Group 2 (2.0 mg/kg AD10297) | 0.149 | 0.061 | 0.177 | 0.016 |
| Group 3 (2.0 mg/kg AD10912) | 0.163 | 0.077 | 0.182 | 0.160 |
| Group 4 (2.0 mg/kg AD10913) | 0.067 | 0.025 | 0.077 | 0.022 |
| Group 5 (2.0 mg/kg AD10914) | 0.032 | 0.004 | 0.036 | 0.018 |
| Group 6 (2.0 mg/kg AD10915) | 0.126 | 0.022 | 0.146 | 0.030 |
| Group 7 (2.0 mg/kg AD10916) | 0.098 | 0.025 | 0.116 | 0.007 |
| Group 8 (2.0 mg/kg AD10917) | 0.050 | 0.022 | 0.073 | 0.023 |
| Group 9 (2.0 mg/kg AD10918) | 0.064 | 0.023 | 0.073 | 0.035 |
| Group 10 (2.0 mg/kg AD10536) | 0.123 | N/A | 0.153 | N/A |
| Group 11 (2.0 mg/kg AD10919) | 0.112 | N/A | 0.057 | 0.049 |
| Group 12 (2.0 mg/kg AD10920) | 0.073 | 0.003 | 0.048 | 0.003 |
| Group 13 (2.0 mg/kg AD10921) | 0.072 | 0.045 | 0.024 | 0.019 |
| Group 14 (2.0 mg/kg AD10922) | 0.170 | 0.105 | 0.055 | 0.040 |
| Group 15 (2.0 mg/kg AD10923) | 0.115 | 0.065 | 0.047 | 0.014 |
| Group 16 (2.0 mg/kg AD10540) | 0.084 | 0.044 | 0.059 | 0.017 |
| Group 17 (2.0 mg/kg AD10925) | 0.181 | 0.075 | 0.203 | 0.101 |
| Group 18 (2.0 mg/kg AD10926) | 0.301 | 0.091 | 0.254 | 0.062 |
| Group 19 (2.0 mg/kg AD10927) | 0.192 | 0.064 | 0.181 | 0.084 |
| Group 20 (2.0 mg/kg AD10928) | 0.249 | 0.062 | 0.238 | 0.079 |
| Group 21 (2.0 mg/kg AD10929) | 0.314 | 0.069 | 0.272 | 0.083 |
| Group 22 (2.0 mg/kg AD10930) | 0.215 | 0.066 | 0.249 | 0.118 |
| Group 23 (2.0 mg/kg AD10931) | 0.181 | 0.026 | 0.153 | 0.039 |

[0331] Groups 2-23 showed reduction in SEAP as compared to the saline control (Group 1) across all measured time points, which as described herein, indicates inhibition of SARS-CoV-2 RNA in the SARS-CoV-2-SEAP mouse model.

### Example 5. In Vivo Testing of CoV RNAi Agents in SARS-CoV-2-SEAP Mice

[0332] The SARS-CoV-2-SEAP mouse model described in Example 2, above, was used. At day 1, four (n=4) female C57bl/6 albino mice were given a single subcutaneous (SQ) injection of 200 μl per 20 g body weight containing either 2.0 mg/kg (mpk) of an CoV RNAi agent or saline without an CoV RNAi agent to be used as a control, according to the following Table 16.

TABLE 16
CoV RNAi agent and Dosing for Example 5

| Group ID | Dosing Regimen |
|---|---|
| Group 1 (isotonic saline) | Single SQ injection on day 1 |
| Group 2 (2.0 mg/kg AD10536) | Single SQ injection on day 1 |
| Group 3 (2.0 mg/kg AD10538) | Single SQ injection on day 1 |
| Group 4 (2.0 mg/kg AD11101) | Single SQ injection on day 1 |
| Group 5 (2.0 mg/kg AD11102) | Single SQ injection on day 1 |
| Group 6 (2.0 mg/kg AD11103) | Single SQ injection on day 1 |
| Group 7 (2.0 mg/kg AD11104) | Single SQ injection on day 1 |
| Group 8 (2.0 mg/kg AD11105) | Single SQ injection on day 1 |
| Group 9 (2.0 mg/kg AD11106) | Single SQ injection on day 1 |
| Group 10 (2.0 mg/kg AD11107) | Single SQ injection on day 1 |
| Group 11 (2.0 mg/kg AD11108) | Single SQ injection on day 1 |
| Group 12 (2.0 mg/kg AD11109) | Single SQ injection on day 1 |
| Group 13 (2.0 mg/kg AD11110) | Single SQ injection on day 1 |
| Group 14 (2.0 mg/kg AD11111) | Single SQ injection on day 1 |
| Group 15 (2.0 mg/kg AD11112) | Single SQ injection on day 1 |
| Group 16 (2.0 mg/kg AD11113) | Single SQ injection on day 1 |
| Group 17 (2.0 mg/kg AD11114) | Single SQ injection on day 1 |
| Group 18 (2.0 mg/kg AD11115) | Single SQ injection on day 1 |
| Group 19 (2.0 mg/kg AD11116) | Single SQ injection on day 1 |
| Group 20 (2.0 mg/kg AD10296) | Single SQ injection on day 1 |
| Group 21 (2.0 mg/kg AD11117) | Single SQ injection on day 1 |
| Group 22 (2.0 mg/kg AD11118) | Single SQ injection on day 1 |
| Group 23 (2.0 mg/kg AD11119) | Single SQ injection on day 1 |
| Group 24 (2.0 mg/kg AD11120) | Single SQ injection on day 1 |

[0333] Each of the CoV RNAi agents included N-acetyl-galactosamine targeting ligands ((NAG37)s) conjugated to the 5′-terminal end of the sense strand, as shown in Tables 5, 7A, and 11 and were added as phosphoramidite compounds during the oligonucleotide synthesis process described above in Example 1.

[0334] The injections were performed between the skin and muscle (i.e. subcutaneous injections) into the loose skin over the neck and shoulder area. Four (4) mice in each group were tested (n=4). Serum was collected on day 8, day 15, day 22, and day 29, and SEAP expression levels were determined pursuant to the procedure set forth in Example 2, above. Data from the experiment are shown in the following Table 17, with Average SEAP reflecting the normalized average value of SEAP:

TABLE 17
Average SEAP normalized to pre-treatment and saline
control in SARS-CoV-2 -SEAP mice from Example 5.

| | Day 8 | | Day 15 | |
|---|---|---|---|---|
| | Avg | Std Dev | Avg | Std Dev |
| Group ID | SEAP | (+/−) | SEAP | (+/−) |
| Group 1 (isotonic saline) | 1.000 | 0.184 | 1.000 | 0.259 |
| Group 2 (2.0 mg/kg AD10536) | 0.345 | 0.111 | 0.286 | 0.104 |
| Group 3 (2.0 mg/kg AD10538) | 0.353 | 0.250 | 0.290 | 0.117 |
| Group 4 (2.0 mg/kg AD11101) | 0.219 | 0.135 | 0.153 | 0.074 |
| Group 5 (2.0 mg/kg AD11102) | 0.224 | 0.080 | 0.145 | 0.023 |
| Group 6 (2.0 mg/kg AD11103) | 0.231 | 0.043 | 0.161 | 0.033 |
| Group 7 (2.0 mg/kg AD11104) | 0.266 | 0.056 | 0.178 | 0.055 |
| Group 8 (2.0 mg/kg AD11105) | 0.227 | 0.032 | 0.104 | 0.042 |
| Group 9 (2.0 mg/kg AD11106) | 0.263 | 0.058 | 0.111 | 0.046 |
| Group 10 (2.0 mg/kg AD11107) | 0.234 | 0.030 | 0.122 | 0.004 |
| Group 11 (2.0 mg/kg AD11108) | 0.349 | 0.100 | 0.286 | 0.051 |
| Group 12 (2.0 mg/kg AD11109) | 0.200 | 0.030 | 0.143 | 0.017 |
| Group 13 (2.0 mg/kg AD11110) | 0.175 | 0.027 | 0.053 | 0.012 |
| Group 14 (2.0 mg/kg AD11111) | 0.220 | 0.013 | 0.089 | 0.013 |
| Group 15 (2.0 mg/kg AD11112) | 0.223 | 0.051 | 0.076 | 0.023 |
| Group 16 (2.0 mg/kg AD11113) | 0.196 | 0.035 | 0.134 | 0.041 |
| Group 17 (2.0 mg/kg AD11114) | 0.598 | 0.197 | 0.311 | 0.065 |
| Group 18 (2.0 mg/kg AD11115) | 0.555 | 0.029 | 0.334 | 0.031 |
| Group 19 (2.0 mg/kg AD11116) | 0.335 | 0.062 | 0.159 | 0.053 |
| Group 20 (2.0 mg/kg AD10296) | 0.451 | 0.145 | 0.242 | 0.051 |
| Group 21 (2.0 mg/kg AD11117) | 0.234 | 0.039 | 0.234 | 0.054 |
| Group 22 (2.0 mg/kg AD11118) | 0.225 | 0.078 | 0.105 | 0.040 |
| Group 23 (2.0 mg/kg AD11119) | 0.978 | 0.268 | 0.726 | 0.219 |
| Group 24 (2.0 mg/kg AD11120) | 1.118 | 0.201 | 0.804 | 0.336 |
| | Day 22 | | Day 29 | |
| | Avg | Std Dev | Avg | Std Dev |
| Group ID | SEAP | (+/−) | SEAP | (+/−) |
| Group 1 (isotonic saline) | 1.000 | 0.228 | 1.000 | 0.923 |
| Group 2 (2.0 mg/kg AD10536) | 0.319 | 0.128 | 0.397 | 0.098 |
| Group 3 (2.0 mg/kg AD10538) | 0.353 | 0.106 | 0.328 | 0.056 |
| Group 4 (2.0 mg/kg AD11101) | 0.226 | 0.039 | 0.219 | 0.082 |
| Group 5 (2.0 mg/kg AD11102) | 0.148 | 0.045 | 0.192 | 0.091 |
| Group 6 (2.0 mg/kg AD11103) | 0.167 | 0.064 | 0.185 | 0.111 |
| Group 7 (2.0 mg/kg AD11104) | 0.171 | 0.046 | 0.189 | 0.090 |
| Group 8 (2.0 mg/kg AD11105) | 0.098 | 0.054 | 0.137 | 0.079 |
| Group 9 (2.0 mg/kg AD11106) | 0.110 | 0.069 | 0.122 | 0.040 |
| Group 10 (2.0 mg/kg AD11107) | 0.118 | 0.009 | 0.089 | 0.047 |
| Group 11 (2.0 mg/kg AD11108) | 0.333 | 0.078 | 0.445 | 0.147 |
| Group 12 (2.0 mg/kg AD11109) | 0.168 | 0.020 | 0.285 | 0.235 |
| Group 13 (2.0 mg/kg AD11110) | 0.092 | 0.032 | 0.095 | 0.030 |
| Group 14 (2.0 mg/kg AD11111) | 0.192 | 0.025 | 0.124 | 0.027 |
| Group 15 (2.0 mg/kg AD11112) | 0.104 | 0.019 | 0.115 | 0.034 |
| Group 16 (2.0 mg/kg AD11113) | 0.202 | 0.090 | 0.132 | 0.060 |
| Group 17 (2.0 mg/kg AD11114) | 0.389 | 0.099 | 0.196 | 0.056 |
| Group 18 (2.0 mg/kg AD11115) | 0.448 | 0.088 | 0.261 | 0.036 |
| Group 19 (2.0 mg/kg AD11116) | 0.149 | 0.085 | 0.149 | 0.094 |
| Group 20 (2.0 mg/kg AD10296) | 0.369 | 0.107 | 0.243 | 0.068 |
| Group 21 (2.0 mg/kg AD11117) | 0.235 | 0.126 | 0.216 | 0.057 |
| Group 22 (2.0 mg/kg AD11118) | 0.122 | 0.054 | 0.135 | 0.067 |
| Group 23 (2.0 mg/kg AD11119) | 0.990 | 0.344 | 0.517 | 0.192 |
| Group 24 (2.0 mg/kg AD11120) | 0.831 | 0.251 | 0.487 | 0.198 |

[0335] Groups 2-22 showed reductions in SEAP as compared to the saline control (Group 1), which as described herein, indicates inhibition of SARS-CoV-2 RNA in the SARS-CoV-2-SEAP mouse model.

### Example 6. In Vivo Testing of CoV RNAi Agents in SARS-CoV-2-SEAP Mice

[0336] The SARS-CoV-2-SEAP mouse model described in Example 2, above, was used. At day 1, four (n=4) female C57bl/6 albino mice were given a single subcutaneous (SQ) injection of 250 μl per 25 g body weight containing either 2.0 mg/kg (mpk) of an CoV RNAi agent or saline without an CoV RNAi agent to be used as a control, according to the following Table 18.

TABLE 18
CoV RNAi agent and Dosing for Example 6

| Group ID | Dosing Regimen |
|---|---|
| Group 1 (isotonic saline) | Single SQ injection on day 1 |
| Group 2 (2.0 mg/kg AD10912) | Single SQ injection on day 1 |
| Group 3 (2.0 mg/kg AD11122) | Single SQ injection on day 1 |
| Group 4 (2.0 mg/kg AD11123) | Single SQ injection on day 1 |
| Group 5 (2.0 mg/kg AD11124) | Single SQ injection on day 1 |
| Group 6 (2.0 mg/kg AD11125) | Single SQ injection on day 1 |
| Group 7 (2.0 mg/kg AD11126) | Single SQ injection on day 1 |
| Group 8 (2.0 mg/kg AD11127) | Single SQ injection on day 1 |
| Group 9 (2.0 mg/kg AD11128) | Single SQ injection on day 1 |
| Group 10 (2.0 mg/kg AD11129) | Single SQ injection on day 1 |

[0337] Each of the CoV RNAi agents included N-acetyl-galactosamine targeting ligands ((NAG37)s) conjugated to the 5′-terminal end of the sense strand, as shown in Tables 5, 7A, and 11 and were added as phosphoramidite compounds during the oligonucleotide synthesis process described above in Example 1.

[0338] The injections were performed between the skin and muscle (i.e. subcutaneous injections) into the loose skin over the neck and shoulder area. Four (4) mice in each group were tested (n=4). Serum was collected on day 8, day 15, day 22, and day 29, and SEAP expression levels were determined pursuant to the procedure set forth in Example 2, above. Data from the experiment are shown in the following Table 19, with Average SEAP reflecting the normalized average value of SEAP.

TABLE 19
Average SEAP normalized to pre-treatment and saline
control in SARS-CoV-2 -SEAP mice from Example 6.

| | Day 8 | | Day 15 | |
|---|---|---|---|---|
| | Avg | Std Dev | Avg | Std Dev |
| Group ID | SEAP | (+/−) | SEAP | (+/−) |
| Group 1 (isotonic saline) | 1.000 | 0.303 | 1.000 | 0.415 |
| Group 2 (2.0 mg/kg AD10912) | 0.478 | 0.174 | 0.540 | 0.230 |
| Group 3 (2.0 mg/kg AD11122) | 0.208 | 0.069 | 0.142 | 0.035 |
| Group 4 (2.0 mg/kg AD11123) | 0.494 | 0.077 | 0.559 | 0.098 |
| Group 5 (2.0 mg/kg AD11124) | 0.913 | 0.234 | 0.953 | 0.215 |
| Group 6 (2.0 mg/kg AD11125) | 0.351 | 0.084 | 0.398 | 0.085 |
| Group 7 (2.0 mg/kg AD11126) | 0.810 | 0.148 | 0.874 | 0.188 |
| Group 8 (2.0 mg/kg AD11127) | 0.530 | 0.113 | 0.561 | 0.131 |
| Group 9 (2.0 mg/kg AD11128) | 1.152 | 0.279 | 1.126 | 0.342 |
| Group 10 (2.0 mg/kg AD11129) | 0.976 | 0.180 | 1.000 | 0.248 |
| | Day 22 | | Day 29 | |
| | Avg | Std Dev | Avg | Std Dev |
| Group ID | SEAP | (+/−) | SEAP | (+/−) |
| Group 1 (isotonic saline) | 1.000 | 0.459 | 1.000 | 0.539 |
| Group 2 (2.0 mg/kg AD10912) | 0.634 | 0.285 | 0.748 | 0.422 |
| Group 3 (2.0 mg/kg AD11122) | 0.158 | 0.032 | 0.170 | 0.029 |
| Group 4 (2.0 mg/kg AD11123) | 0.531 | 0.096 | 0.657 | 0.183 |
| Group 5 (2.0 mg/kg AD11124) | 0.891 | 0.193 | 1.109 | 0.292 |
| Group 6 (2.0 mg/kg AD11125) | 0.398 | 0.104 | 0.606 | 0.238 |
| Group 7 (2.0 mg/kg AD11126) | 0.901 | 0.181 | 1.047 | 0.121 |
| Group 8 (2.0 mg/kg AD11127) | 0.588 | 0.195 | 0.768 | 0.377 |
| Group 9 (2.0 mg/kg AD11128) | 1.068 | 0.345 | 1.159 | 0.495 |
| Group 10 (2.0 mg/kg AD11129) | 0.960 | 0.310 | 1.236 | 0.715 |

[0339] Groups 2-4, 6, and 8 showed reduction in SEAP as compared to the saline control (Group 1), which as described herein, indicates inhibition of SARS-CoV-2 RNA in the SARS-CoV-2-SEAP mouse model.

### Example 7. In Vivo Testing of CoV RNAi Agents in SARS-CoV-2-SEAP Mice

[0340] The SARS-CoV-2-SEAP mouse model described in Example 2, above, was used. At day 1, four (n=4) female C57bl/6 albino mice were given a single subcutaneous (SQ) injection of 200 μl per 20 g body weight containing either 2.0 mg/kg (mpk), 1.0 mg/kg (mpk) or 0.5 mg/kg (mpk) of an CoV RNAi agent or saline without an CoV RNAi agent to be used as a control, according to the following Table 20.

TABLE 20
CoV RNAi agent and Dosing for Example 7

| Group ID | Dosing Regimen |
|---|---|
| Group 1 (isotonic saline) | Single SQ injection on day 1 |
| Group 2 (1.0 mg/kg AD10297) | Single SQ injection on day 1 |
| Group 3 (2.0 mg/kg AD10914) | Single SQ injection on day 1 |
| Group 4 (1.0 mg/kg AD10914) | Single SQ injection on day 1 |
| Group 5 (0.5 mg/kg AD10914) | Single SQ injection on day 1 |
| Group 6 (1.0 mg/kg AD11610) | Single SQ injection on day 1 |
| Group 7 (1.0 mg/kg AD11611) | Single SQ injection on day 1 |
| Group 8 (1.0 mg/kg AD10538) | Single SQ injection on day 1 |
| Group 9 (1.0 mg/kg AD11105) | Single SQ injection on day 1 |
| Group 10 (1.0 mg/kg AD11612) | Single SQ injection on day 1 |
| Group 11 (1.0 mg/kg AD11118) | Single SQ injection on day 1 |

[0341] Each of the CoV RNAi agents included N-acetyl-galactosamine targeting ligands ((NAG37)s) conjugated to the 5′-terminal end of the sense strand, as shown in Tables 5, 7A, and 11 and were added as phosphoramidite compounds during the oligonucleotide synthesis process described above in Example 1.

[0342] The injections were performed between the skin and muscle (i.e. subcutaneous injections) into the loose skin over the neck and shoulder area. Four (4) mice in each group were tested (n=4). Serum was collected on day 8, day 15, day 22, and day 29, and SEAP expression levels were determined pursuant to the procedure set forth in Example 2, above. Data from the experiment are shown in the following Table 21, with Average SEAP reflecting the normalized average value of SEAP:

TABLE 21
Average SEAP normalized to pre-treatment and saline
control in SARS-CoV-2 -SEAP mice from Example 7.

| | Day 8 | | Day 15 | |
|---|---|---|---|---|
| | Avg | Std Dev | Avg | Std Dev |
| Group ID | SEAP | (+/−) | SEAP | (+/−) |
| Group 1 (isotonic saline) | 1.000 | 0.112 | 1.000 | 0.252 |
| Group 2 (1.0 mg/kg AD10297) | 0.533 | 0.109 | 0.420 | 0.230 |
| Group 3 (2.0 mg/kg AD10914) | 0.224 | 0.076 | 0.143 | 0.022 |
| Group 4 (1.0 mg/kg AD10914) | 0.468 | 0.158 | 0.426 | 0.102 |
| Group 5 (0.5 mg/kg AD10914) | 0.558 | 0.229 | 0.397 | 0.205 |
| Group 6 (1.0 mg/kg AD11610) | 0.476 | 0.098 | 0.286 | 0.102 |
| Group 7 (1.0 mg/kg AD11611) | 0.362 | 0.073 | 0.221 | 0.024 |
| Group 8 (1.0 mg/kg AD10538) | 0.600 | 0.147 | 0.526 | 0.151 |
| Group 9 (1.0 mg/kg AD11105) | 0.337 | 0.040 | 0.137 | 0.069 |
| Group 10 (1.0 mg/kg AD11612) | 0.282 | 0.062 | 0.212 | 0.086 |
| Group 11 (1.0 mg/kg AD11118) | 0.401 | 0.083 | 0.324 | 0.100 |
| | Day 22 | | Day 29 | |
| | Avg | Std Dev | Avg | Std Dev |
| Group ID | SEAP | (+/−) | SEAP | (+/−) |
| Group 1 (isotonic saline) | 1.000 | 0.517 | 1.000 | 0.888 |
| Group 2 (1.0 mg/kg AD10297) | 0.576 | 0.188 | 0.505 | 0.177 |
| Group 3 (2.0 mg/kg AD10914) | 0.175 | 0.021 | 0.248 | 0.073 |
| Group 4 (1.0 mg/kg AD10914) | 0.491 | 0.395 | 0.547 | 0.552 |
| Group 5 (0.5 mg/kg AD10914) | 0.490 | 0.189 | 0.444 | 0.225 |
| Group 6 (1.0 mg/kg AD11610) | 0.463 | 0.120 | 0.431 | 0.124 |
| Group 7 (1.0 mg/kg AD11611) | 0.282 | 0.106 | 0.348 | 0.174 |
| Group 8 (1.0 mg/kg AD10538) | 0.521 | 0.248 | 0.410 | 0.128 |
| Group 9 (1.0 mg/kg AD11105) | 0.285 | 0.076 | 0.259 | 0.056 |
| Group 10 (1.0 mg/kg AD11612) | 0.261 | 0.147 | 0.243 | 0.108 |
| Group 11 (1.0 mg/kg AD11118) | 0.410 | 0.157 | 0.535 | 0.235 |

[0343] Groups 2-11 (at all time points) showed reduction in SEAP as compared to the saline control (Group 1), which as described herein, indicates inhibition of SARS-CoV-2 RNA in the SARS-CoV-2-SEAP mouse model.

### Example 8. In Vivo Testing of CoV RNAi Agents in SARS-CoV-2-SEAP Mice

[0344] The SARS-CoV-2-SEAP mouse model described in Example 2, above, was used. At day 1, four (n=4) female C57bl/6 albino mice were given a single subcutaneous (SQ) injection of 250 μl per 25 g body weight containing either 1.0 mg/kg (mpk), 2.0 mg/kg (mpk) or 0.5 mg/kg (mpk) of a CoV RNAi agent or saline without an CoV RNAi agent to be used as a control, according to the following Table 22.

TABLE 22
CoV RNAi agent and Dosing for Example 8

| Group ID | Dosing Regimen |
|---|---|
| Group 1 (isotonic saline) | Single SQ injection on day 1 |
| Group 2 (1.0 mg/kg AD10536) | Single SQ injection on day 1 |
| Group 3 (2.0 mg/kg AD10921) | Single SQ injection on day 1 |
| Group 4 (1.0 mg/kg AD10921) | Single SQ injection on day 1 |
| Group 5 (0.5 mg/kg AD10921) | Single SQ injection on day 1 |
| Group 6 (1.0 mg/kg AD11108) | Single SQ injection on day 1 |
| Group 7 (1.0 mg/kg AD11110) | Single SQ injection on day 1 |
| Group 8 (1.0 mg/kg AD11613) | Single SQ injection on day 1 |
| Group 9 (1.0 mg/kg AD11112) | Single SQ injection on day 1 |
| Group 10 (1.0 mg/kg AD11614) | Single SQ injection on day 1 |
| Group 11 (1.0 mg/kg AD11615) | Single SQ injection on day 1 |
| Group 12 (1.0 mg/kg AD11616) | Single SQ injection on day 1 |

[0345] Each of the CoV RNAi agents included N-acetyl-galactosamine targeting ligands ((NAG37)s) conjugated to the 5′-terminal end of the sense strand, as shown in Tables 5, 7A, and 11 and were added as phosphoramidite compounds during the oligonucleotide synthesis process described above in Example 1.

[0346] The injections were performed between the skin and muscle (i.e. subcutaneous injections) into the loose skin over the neck and shoulder area. Four (4) mice in each group were tested (n=4). Serum was collected on day 8, day 15, day 22, and day 29, and SEAP expression levels were determined pursuant to the procedure set forth in Example 2, above. Data from the experiment are shown in the following Table 23, with Average SEAP reflecting the normalized average value of SEAP.

TABLE 23
Average SEAP normalized to pre-treatment and saline
control in SARS-CoV-2 -SEAP mice from Example 8.

| | Day 8 | | Day 15 | |
|---|---|---|---|---|
| | Avg | Std Dev | Avg | Std Dev |
| Group ID | SEAP | (+/−) | SEAP | (+/−) |
| Group 1 (isotonic saline) | 1.000 | 0.248 | 1.000 | 0.266 |
| Group 2 (1.0 mg/kg AD10536) | 0.418 | 0.054 | 0.381 | 0.054 |
| Group 3 (2.0 mg/kg AD10921) | 0.151 | 0.024 | 0.122 | 0.009 |
| Group 4 (1.0 mg/kg AD10921) | 0.236 | 0.076 | 0.124 | 0.073 |
| Group 5 (0.5 mg/kg AD10921) | 0.380 | 0.161 | 0.230 | 0.042 |
| Group 6 (1.0 mg/kg AD11108) | 0.263 | 0.060 | 0.254 | 0.092 |
| Group 7 (1.0 mg/kg AD11110) | 0.218 | 0.057 | 0.128 | 0.041 |
| Group 8 (1.0 mg/kg AD11613) | 0.195 | 0.047 | 0.168 | 0.058 |
| Group 9 (1.0 mg/kg AD11112) | 0.212 | 0.042 | 0.149 | 0.035 |
| Group 10 (1.0 mg/kg AD11614) | 0.196 | 0.059 | 0.140 | 0.062 |
| Group 11 (1.0 mg/kg AD11615) | 0.190 | 0.033 | 0.160 | 0.079 |
| Group 12 (1.0 mg/kg AD11616) | 0.183 | 0.060 | 0.141 | 0.048 |
| | Day 22 | | Day 29 | |
| | Avg | Std Dev | Avg | Std Dev |
| Group ID | SEAP | (+/−) | SEAP | (+/−) |
| Group 1 (isotonic saline) | 1.000 | 0.350 | 1.000 | 0.341 |
| Group 2 (1.0 mg/kg AD10536) | 0.364 | 0.094 | 0.539 | 0.203 |
| Group 3 (2.0 mg/kg AD10921) | 0.121 | 0.027 | 0.172 | 0.083 |
| Group 4 (1.0 mg/kg AD10921) | 0.159 | 0.054 | 0.184 | 0.047 |
| Group 5 (0.5 mg/kg AD10921) | 0.207 | 0.050 | 0.321 | 0.140 |
| Group 6 (1.0 mg/kg AD11108) | 0.301 | 0.160 | 0.512 | 0.352 |
| Group 7 (1.0 mg/kg AD11110) | 0.149 | 0.080 | 0.137 | 0.039 |
| Group 8 (1.0 mg/kg AD11613) | 0.140 | 0.061 | 0.176 | 0.084 |
| Group 9 (1.0 mg/kg AD11112) | 0.170 | 0.048 | 0.178 | 0.027 |
| Group 10 (1.0 mg/kg AD11614) | 0.124 | 0.065 | 0.182 | 0.096 |
| Group 11 (1.0 mg/kg AD11615) | 0.142 | 0.094 | 0.155 | 0.101 |
| Group 12 (1.0 mg/kg AD11616) | 0.171 | 0.068 | 0.286 | 0.265 |

[0347] Each of the CoV RNAi agents in each of the dosing groups (i.e., Groups 2 through 12) showed reduction in SEAP as compared to the saline control (Group 1) across all measured time points, which as described herein, indicates inhibition of SARS-CoV-2 in the SARS-CoV-2-SEAP mouse model.

### Example 9. In Vivo Testing of CoV RNAi Agents in SARS-CoV-2-SEAP Mice

[0348] The SARS-CoV-2-SEAP mouse model described in Example 2, above, was used. At day 1, four (n=4) female C57bl/6 albino mice were given a single subcutaneous (SQ) injection of 200 μl per 20 g body weight containing either 2.0 mg/kg (mpk), 1.0 mg/kg (mpk) or 0.5 mg/kg (mpk) of an CoV RNAi agent or saline without an CoV RNAi agent to be used as a control, according to the following Table 24.

TABLE 24
CoV RNAi agent and Dosing for Example 9

| Group ID | Dosing Regimen |
|---|---|
| Group 1 (isotonic saline) | Single SQ injection on day 1 |
| Group 2 (2.0 mg/kg AD11611) | Single SQ injection on day 1 |
| Group 3 (1.0 mg/kg AD11611) | Single SQ injection on day 1 |
| Group 4 (0.5 mg/kg AD11611) | Single SQ injection on day 1 |
| Group 5 (2.0 mg/kg AD11122) | Single SQ injection on day 1 |
| Group 6 (1.0 mg/kg AD11122) | Single SQ injection on day 1 |
| Group 7 (0.5 mg/kg AD11122) | Single SQ injection on day 1 |
| Group 8 (2.0 mg/kg AD11105) | Single SQ injection on day 1 |
| Group 9 (1.0 mg/kg AD11105) | Single SQ injection on day 1 |
| Group 10 (0.5 mg/kg AD11105) | Single SQ injection on day 1 |

[0349] Each of the CoV RNAi agents included N-acetyl-galactosamine targeting ligands ((NAG37)s) conjugated to the 5′-terminal end of the sense strand, as shown in Tables 5, 7A, and 11 and were added as phosphoramidite compounds during the oligonucleotide synthesis process described above in Example 1.

[0350] These CoV RNAi agents were selected for inclusion in this study based upon data from previous studies that identified each of them as being the most highly potent at inhibiting expression. AD11611 includes an antisense strand nucleotide sequence targeting position 6412 of the SARS-CoV-2 genome; AD11122 includes an antisense strand nucleotide sequence targeting position 4156 of the SARS-CoV-2 genome; and AD 11105 includes an antisense strand nucleotide sequence targeting position 29150 of the SARS-CoV-2 genome.

[0351] The injections were performed between the skin and muscle (i.e. subcutaneous injections) into the loose skin over the neck and shoulder area. Four (4) mice in each group were tested (n=4). Serum was collected on day 8, day 15, day 22, and day 29, and SEAP expression levels were determined pursuant to the procedure set forth in Example 2, above. Data from the experiment are shown in the following Table 25, with Average SEAP reflecting the normalized average value of SEAP:

TABLE 25
Average SEAP normalized to pre-treatment and saline
control in SARS-CoV-2 -SEAP mice from Example 9.

| | Day 8 | | Day 15 | |
|---|---|---|---|---|
| | Avg | Std Dev | Avg | Std Dev |
| Group ID | SEAP | (+/−) | SEAP | (+/−) |
| Group 1 (isotonic saline) | 1.000 | 0.308 | 1.000 | 0.189 |
| Group 2 (2.0 mg/kg AD11611) | 0.243 | 0.081 | 0.213 | 0.088 |
| Group 3 (1.0 mg/kg AD11611) | 0.377 | 0.129 | 0.345 | 0.206 |
| Group 4 (0.5 mg/kg AD11611) | 0.438 | 0.136 | 0.365 | 0.114 |
| Group 5 (2.0 mg/kg AD11122) | 0.246 | 0.097 | 0.147 | 0.080 |
| Group 6 (1.0 mg/kg AD11122) | 0.422 | 0.086 | 0.330 | 0.090 |
| Group 7 (0.5 mg/kg AD11122) | 0.496 | 0.187 | 0.536 | 0.204 |
| Group 8 (2.0 mg/kg AD11105) | 0.238 | 0.043 | 0.164 | 0.050 |
| Group 9 (1.0 mg/kg AD11105) | 0.427 | 0.360 | 0.339 | 0.336 |
| Group 10 (0.5 mg/kg AD11105) | 0.319 | 0.102 | 0.230 | 0.058 |
| | Day 22 | | Day 29 | |
| | Avg | Std Dev | Avg | Std Dev |
| Group ID | SEAP | (+/−) | SEAP | (+/−) |
| Group 1 (isotonic saline) | 1.000 | 0.185 | 1.000 | 0.243 |
| Group 2 (2.0 mg/kg AD11611) | 0.231 | 0.115 | 0.231 | 0.095 |
| Group 3 (1.0 mg/kg AD11611) | 0.382 | 0.112 | 0.343 | 0.109 |
| Group 4 (0.5 mg/kg AD11611) | 0.464 | 0.151 | 0.329 | 0.103 |
| Group 5 (2.0 mg/kg AD11122) | 0.146 | 0.079 | 0.170 | 0.081 |
| Group 6 (1.0 mg/kg AD11122) | 0.409 | 0.121 | 0.483 | 0.179 |
| Group 7 (0.5 mg/kg AD11122) | 0.420 | 0.125 | 0.380 | 0.157 |
| Group 8 (2.0 mg/kg AD11105) | 0.153 | 0.038 | 0.143 | 0.040 |
| Group 9 (1.0 mg/kg AD11105) | 0.335 | 0.340 | 0.262 | 0.266 |
| Group 10 (0.5 mg/kg AD11105) | 0.225 | 0.076 | 0.216 | 0.092 |

[0352] As shown in the tables above, each of the CoV RNAi agents in each of the dosing groups (i.e., Groups 2 through 10) showed substantial reductions in SEAP as compared to the saline control (Group 1) across all measured time points, which as described herein, indicates inhibition of SARS-CoV-2 in the SARS-CoV-2-SEAP mouse model.

### Example 10. Testing of RNAi Triggers in a Hamster Model of SARS-CoV-2 Infection

[0353] To assess the potency of the RNAi agents, a hamster model of SARS-CoV-2 infection was also used. Six to eight week old male Syrian golden hamsters were divided into 9 groups according to Table 26 below. Hamsters were pre-treated with RNAi agent or saline on study days −8 and −6 via intratracheal instillation (IT) prior to SARS-CoV-2 challenge delivered intranasally (IN) on study day 0. Groups were euthanized on either study day 3 or day 7 post SARS-CoV-2 challenge. Group 1 was a control group administered saline on day −8 and day −6 pre-challenge. Groups 2-4 were administered AC001924 and AC001926 individually or in combination on day −8 and day −6 at single 5 mg/kg IT doses and euthanized on study day 3 post-SARS-CoV-2 challenge. Groups 5 and 6 were administered saline on day −8 and day −6 Groups 7-9 were administered AC001924 and AC001926 individually or in combination on day −8 and day −6 at single 5 mg/kg IT doses and euthanized on study day 7 post-SARS-CoV-2 challenge. For animals receiving a combination of AC001924 and AC001926, the two RNAi agents were combined, and the dose indicated in Table 26 is the total dose of the two duplexes. AC001924 includes an antisense strand nucleotide sequence targeting position 29150 of the SARS-CoV-2 genome, and AC001926 includes an antisense strand nucleotide sequence targeting position 15886 of the SARS-CoV-2 genome. Intratracheal instillation was administered at a volume of 2 mL/kg based on body weight. For SARS-CoV-2 challenge intranasally, administration of 9×10³ plaque-forming units (PFU) of WA01 isolate was given at a volume of 50 μL volume in each nostril. Body weights were determined daily from day −4 until terminal collection for all groups. At euthanization, left lung lobes were collected, with one half snap frozen for analysis of PFU in tissue homogenate, and one half for viral RNA qPCR. Right lungs were inflated with 10% neutral buffered formalin (NBF), transferred to 70% ethanol, and processed into paraffin blocks for H&E staining.

TABLE 26
Experimental Design

| | | | | Dose | | | |
|---|---|---|---|---|---|---|---|
| | | | | Level per | Treatment | SARS-CoV-2 | Terminal |
| Group | N | Treatment | Route | Treatment | Days | challenge | Collection |
| 1 | 8 | Saline | IT | 0 mg/kg | D-8, D-6 | D 0 | D 3 |
| 2 | 8 | AC001924 | IT | 5 mg/kg | D-8, D-6 | D 0 | D 3 |
| | | (pos 29150) | | | | | |
| 3 | 8 | AC001926 | IT | 5 mg/kg | D-8, D-6 | D 0 | D 3 |
| | | (pos 15886) | | | | | |
| 4 | 8 | AC001924 | IT | 5 mg/kg | D-8, D-6 | D 0 | D 3 |
| | | (pos 29150) + | | | | | |
| | | AC001926 | | | | | |
| | | (pos 15886) | | | | | |
| 5 | 3 | Saline | IT | 0 mg/kg | D-8, D-6 | No challenge | D 7 |
| 6 | 8 | Saline | IT | 0 mg/kg | D-8, D-6 | D 0 | D 7 |
| 7 | 8 | AC001924 | IT | 5 mg/kg | D-8, D-6 | D 0 | D 7 |
| | | (pos 29150) | | | | | |
| 8 | 8 | AC001926 | IT | 5 mg/kg | D-8, D-6 | D 0 | D 7 |
| | | (pos 15886) | | | | | |
| 9 | 8 | AC001924 | IT | 5 mg/kg | D-8, D-6 | D 0 | D 7 |
| | | (pos 29150) + | | | | | |
| | | AC001926 | | | | | |
| | | (pos 15886) | | | | | |

### Results

[0354] The results shown in FIGS. 2 through 7 demonstrate that RNAi agents AC001924 and AC001926 delivered individually or in combination reduce SARS-CoV-2 genomic and subgenomic RNA, reduce total inflammation and alveolar inflammation, reduce the number of PFUs in tissue homogenate, and allows body weight restoration. Specifically, and for example, RNAi agent AC001924 (position 29150) reduced genomic RNA and subgenomic RNA by 83% and 79%, respectively, relative to the SARS-CoV-2 infected saline control group on day 3 post-challenge as shown in FIG. 2 and FIG. 3. Hamsters treated with AC001924 also reduced total lung tissue inflammation and alveolar inflammation (as quantified by HALO) by 49% and 51%, respectively, relative to the SARS-CoV-2 infected saline control group on day 7 post-challenge as shown in FIG. 4 and FIG. 5. Further, AC001924 resulted in an 80% reduction in tissue homogenate PFU on day 3 dpi, as shown in FIG. 6. Lastly, AC001924 treatment resulted in the greatest restoration of body weights following SARS-CoV-2 infection over the course of the study, as reported in FIG. 7.

### Example 11. SARS-COV-2 Delta and Omicron Variants In-Silico Analysis

[0355] In late 2020, the Delta variant (B.1.617.2) of SARS-CoV-2 was first detected in India, and rapidly spread to become the dominant global strain of SARS-CoV-2. An in silico assessment was conducted to determine whether the six identified targeted sequence positions in Table 2 (i.e., CoV RNAi agents targeting the SARS-CoV-2 genome at positions 29150, 6412, 4156, 4917, 14503, and 15886) were conserved across the Delta variant transcripts reported in the NCBI database. A total of 7,794 SARS-CoV-2 transcripts from a human host that had Pango lineage (B.1.617.1, B.1.617.2, and B.1.617.3) were identified, and all six of the identified candidate sequence positions reported in Table 2 were conserved across at least 98% of the reported Delta variant transcripts in the NCBI database. This indicates that CoV RNAi agents designed to target the SARS-CoV-2 RNA at these positions would be expected to inhibit the SARS-CoV-2 Delta variant in the vast majority of infected subjects.

[0356] In November 2021, the Omicron variant (B.1.1.529) of SARS-CoV-2 was reported in South Africa, which was identified as being capable of multiplying approximately 70 times faster than the previously most prominent variant, the Delta variant. Shortly thereafter, the Omicron variant became the most prominent variant across the world. An in silico assessment was conducted to determine whether the six identified targeted sequence positions in Table 2 (i.e., CoV RNAi agents targeting the SARS-CoV-2 genome at positions 29150, 6412, 4156, 4917, 14503, and 15886) were conserved across the reported Omicron gene variant sequences reported in the NCBI database. As of Jan. 31, 2022, there were 820 different Omicron variant genome sequences reported in the NCBI database, and all six of the identified candidate sequence positions reported in Table 2 had sequences that were conserved across 99% of the reported Omicron sequences, indicating that CoV RNAi agents disclosed herein having sequences designed to inhibit expression of SARS-CoV-2 at positions 29150, 6412, 4156, 4917, 14503, and 15886 would be expected to inhibit the SARS-CoV-2 Omicron variant in the vast majority of infected subjects.

### Example 12. In Vitro Testing of CoV RNAi Agents in Vero E6 Cells. Texas

[0357] CoV RNAi agents were evaluated for their effectiveness (individually and in combination) to reduce SARS-CoV-2 virions, genomic and subgenomic RNA. SARS-CoV-2 (BEI Resources, 2019-nCoV/USA-WA1/2020 strain) was obtained, and infected onto Vero E6 cells at a multiplicity of infection (MOI) of 0.001 to create working viral stocks. Viral titers were determined by plaque assay using Vero E6 cells.

[0358] Transfection conditions were characterized for Vero E6 cells. Positive and negative siRNA construct controls were selected. Vero E6 cells were transfected with Lipofectamine RNAiMAX in 96-well plates with 0.1 nM, 1 nM, and 10 nM siRNA. At time points 24 hour (hr), 48 hr, and 72 hr post-transfection, RNA analysis was performed using Invitrogen TaqMan™ Gene Expression Cells to C_{T}™ kit (Invitrogen Catalog No. 4399002). RT-qPCR measurement of positive control mRNA normalized to hPPIA; the hPPIA endogenous control for normalization (cyclophilin A, Thermo Fisher catalog #4326316E).

[0359] SARS-CoV-2 RNAi agents were transfected onto Vero E6 cells. At 48 hr post transfection, the Vero E6 cells (transfected with CoV RNAi agents) were then infected with SARS-CoV-2. Transfection was performed at 5000 cells/well via RNAiMax, MOI 0.01 (200-300 PFU/ml)-96-well-format. The plaque assay immunostained for SARS-NP. Percent % virus inhibition was calculated by the following equation:

$$\frac{[ ( plaques in NC siRNA ) - ( plaques in test siRNA ) ]}{plaques in NC siRNA} \times 100$$

[0360] The CoV RNAi agents tested are listed in the following Table 27. The in vitro screen results are shown in the following Table 28, from two separate experiments.

TABLE 27
CoV RNAi agents screened for Example 12.

| AD Duplex | Targeted Viral | Region of |
|---|---|---|
| ID | Genome Position | CoV Genome |
| AD08584 | 6412 | NSP3 |
| AD08586 | 12284 | NSP8 |
| AD08588 | 13766 | RDRP |
| AD08591 | 14503 | RDRP |
| AD08592 | 14511 | RDRP |
| AD08607 | 26304 | E |
| AD08608 | 26330 | E |
| AD08609 | 26367 | E |
| AD08610 | 26370 | E |
| AD08611 | 26371 | E |
| AD08617 | 27184 | M |
| AD08857 | 10931 | 3CP |
| AD08858 | 11434 | NSP6 |
| AD08859 | 15885 | RDRP |
| AD08860 | 15886 | RDRP |
| AD08862 | 20943 | 2′ORMT |
| AD08930 | 28590 | N |
| AD08933 | 29064 | N |
| AD08935 | 29150 | N |
| AD08929 | 28587 | N |

TABLE 28A
In vitro CoV RNAi agent screening,
percent % CoV virus inhibition.

| AD Duplex ID | % CoV Virus Inhibition | Standard Deviation |
|---|---|---|
| AD08584 | 98.5491 | 0.9135 |
| AD08586 | 100.0000 | 0.0000 |
| AD08588 | 79.1295 | 6.0258 |
| AD08591 | 99.6652 | 0.3702 |
| AD08592 | 99.6652 | 0.5799 |
| AD08607 | 99.4420 | 0.9665 |
| AD08608 | 89.0625 | 1.4293 |
| AD08609 | 85.7143 | 4.0672 |
| AD08610 | 93.8616 | 1.4595 |
| AD08611 | 98.1027 | 3.0340 |
| AD08617 | 58.8170 | 6.2050 |
| AD08857 | 90.9598 | 2.8476 |
| AD08858 | 92.6339 | 1.4974 |
| AD08859 | 97.6563 | 4.0595 |
| AD08860 | 98.5491 | 1.3895 |
| AD08862 | 99.2188 | 0.9135 |
| AD08930 | 98.9955 | 0.7970 |
| AD08933 | 99.6652 | 0.5799 |
| AD08935 | 100.0000 | 0.0000 |
| AD08929 | 99.5536 | 0.3157 |

TABLE 28B
In vitro CoV RNAi agent screening,
percent % CoV virus inhibition.

| AD Duplex ID | % CoV Virus Inhibition | Standard Deviation |
|---|---|---|
| AD08584 | 98.0000 | 1.3237 |
| AD08586 | 99.7273 | 0.4724 |
| AD08588 | 69.0000 | 2.8561 |
| AD08591 | 99.9091 | 0.1575 |
| AD08592 | 99.9091 | 0.1575 |
| AD08607 | 99.7273 | 0.4724 |
| AD08608 | 88.0000 | 1.6262 |
| AD08609 | 83.4545 | 3.3575 |
| AD08610 | 92.2727 | 2.2471 |
| AD08611 | 89.6364 | 1.1923 |
| AD08617 | 45.4545 | 4.6355 |
| AD08857 | 77.6364 | 4.5455 |
| AD08858 | 89.0909 | 1.8363 |
| AD08859 | 99.3636 | 0.3963 |
| AD08860 | 99.1818 | 0.4724 |
| AD08862 | 99.5455 | 0.5961 |
| AD08930 | 99.0909 | 0.7497 |
| AD08933 | 99.6364 | 0.3636 |
| AD08935 | 99.8182 | 0.3149 |
| AD08929 | 99.6364 | 0.2571 |

[0361] As shown in Tables 28A and B, CoV RNAi agents showed inhibition activity, up to 10000 inhibition of the CoV virus inhibition.

### Example 13. Testing of CoV RNAi Agents in Golden Syrian Hamsters Against SARS-CoV-2 Infection

[0362] Golden Syrian hamsters are described as a suitable model to test vaccines and therapeutics for the treatment of SARS-CoV-2 infection. The hamster model of SARS-CoV-2 infection shows signs of weight loss (morbidity), viral replication in the lungs and nasal turbinate, and significant histopathology changes including immune cell infiltration into the lungs. SARS-CoV-2 infection in the hamster model mimics mild SARS-CoV-2 infections reported in humans and, therefore, represents an excellent tool to test anti-SARS-CoV-2 agents (Chen et al, 2020; Imai et al, 2020).

[0363] Vero E6 cells obtained from the American Type Culture Collection (ATCC, CRL-1586) were cultured in Dulbecco's Modified Eagle Medium (DMEM) supplemented with 10% heat inactivated fetal bovine serum (FBS), penicillin (P; 100 IU/ml), streptomycin (S; 100 μg/ml) and L-glutamine (G; 292 μg/ml)) at 37° C. in a 5% CO₂ atmosphere.

[0364] SARS-CoV-2 WA-1/US 2020 strain (Genbank accession MT020880) was obtained from the Biodefense and Emerging Infections Research Resources Repository (BEI Resources, NR-52281). This SARS-CoV-2 WA-1/US 2020 strain was isolated from an oropharyngeal swab from a middle-age patient with a respiratory illness in January 2020 in the state of Washington, US. The virus stock received from BEI Resources was a passage (P4) stock. BEI Resources P4 stock was used to generate a master P5 seed stock. The P5 stock was further used to generate a P6 working stock. Both P5 and P6 SARS-CoV-2 WA-1/US 2020 stocks were generated by infecting Vero E6 cells at low multiplicity of infection (MOI, 0.01) for 72 h. At 72 h post-infection, tissue culture supernatants were collected, clarified, aliquoted, and stored at −80° C. A standard plaque assay (plaque forming units, PFU/ml) in Vero E6 cells was used to titrate P6 viral stock (2.5×10⁶ PFU/ml). Both P5 seed and P6 working stocks were sequenced, using next generation sequencing, and were identical to the BEI Resources original stock compromising virus infectivity.

[0365] Five-week-old male golden Syrian hamsters (n=70 and n=5 spare) were purchased from Charles River Laboratories (Wilmington, MA). Hamsters were provided sterile water and chow ad libitum and acclimatized for at least one week prior to experimental manipulation. All hamsters were healthy at the start of the experiment and ear tagged for identification.

[0366] Animals were distributed to the experimental groups as shown in Table 29. Animals were administered with either saline or test article (5 mg/kg in 2 ml/kg) via the intra-tracheal route on days −7 and −5. AC001888 includes an antisense strand nucleotide sequence targeting position 6412 of the SARS-CoV-2 genome, and AC001961 includes an antisense strand nucleotide sequence targeting position 28587 of the SARS-CoV-2 genome. The hamsters were challenged on day 7 post first administration of test articles, with 2×10⁵ PFU of SARS-CoV-2 (day 0). Hamsters were weighed daily and dosing volume was calculated and adjusted as weight changed for individual hamster. Animals were monitored for morbidity and mortality during the study and were euthanized on days 3 and 7 post infection by intraperitoneal injection of pentobarbital overdose (Fatal plus).

TABLE 29
CoV RNAi agent dosing for animal test groups.

| Experimental | Number of | Treatment | | Challenge |
|---|---|---|---|---|
| Group | Animals | Day | Route | (Intranasal) |
| Saline | 6 | Day −7, −5 | Intra- | SARS-CoV-2 |
| | | | tracheal | |
| Saline + | 16 | Day −7, −5 | Intra- | SARS-CoV-2 |
| SARS-CoV-2 | | | tracheal | |
| AC001888 + | 16 | Day −7, −5 | Intra- | SARS-CoV-2 |
| SARS-CoV-2 | | | tracheal | |
| AC001961 + | 16 | Day −7, −5 | Intra- | SARS-CoV-2 |
| SARS-CoV-2 | | | tracheal | |
| AC001888 + | 16 | Day −7, −5 | Intra- | SARS-CoV-2 |
| AC001961 + | | | tracheal | |
| SARS-CoV-2 | | | | |

[0367] During necropsy, the trachea was cannulated and secured with a 2-0 suture, lungs were harvested and rinsed with PBS, and blot dried to avoid PBS getting into the airways. The right bronchus was clamped and ligated and right lung lobes were cut in half and weighed. One half of the right lung lobes were homogenized in Trizol for RNA isolation. The other half was homogenized in 1 ml of sterile PBS using Precellys tissue homogenizer (Bertin Instruments, Rockville, MD). Lung homogenates were centrifuged at 8,000×g for 15 min at 4° C. and supernatants were collected in aliquots and stored at −80° C. Left lungs were inflated (gravity instillation method) with 3 mL of 10% neutral buffered formalin fixative maintaining 23-25 cmH₂O pressure with fixative for 5 mins to prevent collapse and were submerged in over 10× volumes of 10% formalin (about 35 ml) for 7 days at room temperature. Ligature was removed seven days later, tissue rinsed with PBS, and transferred into 70% ethanol for further processing into paraffin blocks.

[0368] Vero E6 cells were seeded at a density of 2×10⁵ cells/well in flat bottom 24-well tissue culture plates. The following day, media was removed and replaced with 100 pd of ten-fold serial dilutions of the lung homogenate. Virus was adsorbed for 1 h at 37° C. in a humidified 5% C02 incubator. After viral adsorption, post infection media containing 0.9% agarose overlay (Sigma-Aldrich) was added and cells were incubated in a humidified 5% C02 incubator at 37° C. for 48 h. After 48 h, plates were inactivated in 10% neutral buffered formalin (NBF, Thermo-Fisher Scientific) for 12 h. For immunostaining, cells were washed three times with PBS and permeabilized with 0.5% Triton X-100 for 10 min at room temperature. Cells were immuno-stained with 1 μg/ml of a SARS-CoV-1/-2 nucleocapsid protein (NP) cross-reactive monoclonal antibody (Mab; Sigma-Aldrich) 1C7, diluted in 1% BSA for 1 h at 37° C. After incubation with the primary NP Mab, cells were washed three times with PBS, and developed with the Vectastain ABC kit and DAB Peroxidase Substrate kit (Vector 580 Laboratory, Inc., CA, USA) according to manufacturers' instructions. Viral determinations were counted and viral titers were calculated by number of counted plaques for a given dilution, and results were presented as PFU/ml.

[0369] One half of the right lung lobes was weighed and Trizol was calculated and added corresponding to lung tissue weight (1 ml Trizol/100 mg tissue). The tissues were homogenized using Precellys tissue homogenizer (Bertin Instruments, Rockville, MD) and the homogenate was stored at −80 C until RNA extraction. The frozen samples were thawed and 200 μl of chloroform was added to 1 ml lung homogenate. The tubes were then centrifuged and the aqueous layer transferred to a fresh tube. The subsequent steps were performed using on the KingFisher Flex System (Thermo Fisher) with NucleoMag Pathogen kit (Macherey-Nagel 744210.4).

[0370] Hamsters were daily weighed just before the saline/test article treatment i.e. 7 days before SARS-CoV-2 infection (day 0) until the end of the study. Body weight at day −7 was used to calculate % body weight gain/loss in the pre-infection phase. Hamsters in all experimental groups continued to gain weight and showed no signs of morbidity post saline or test articles treatment. All hamsters remained healthy throughout the duration treatment (up to the day of virus challenge). As shown in FIG. 8, the groups receiving saline (n=22) had an average weight gain of 12.9%, whereas groups receiving AC001888 (n=16), AC001961 (n=16) and AC001888+AC001961 (n=16) had an average weight gain of 13.7%, 10.7% and 12.5% respectively on day 7 post first treatment.

[0371] After SARS-CoV-2 infection, hamsters in saline group showed an average body weight loss of 7.3%, whereas hamsters in AC00188, AC001961 and AC00188+AC001961 showed an average body weight loss of 7.5%, 8.06% and 8.22% by day 3 post infection, respectively (n=16/group). On day 6 post infection, hamsters in saline, AC001888, AC001961 and AC001888+AC001961 showed an average body weight loss of 9.7%, 7.4%, 13.4% and 11.4% respectively (n=8/group; FIG. 9). Body weight at day 0 was used to calculate % body weight gain/loss in post infection phase.

[0372] To determine the anti-SARS-CoV-2 effect of test articles, we performed plaque assay to quantitate viral titers in the lungs. Eight hamsters from each group were euthanized at days 3 and 7 post-infection and lungs were collected as described above. The viral titers are shown in FIGS. 10 and 11. At day 3 post infection, the average viral titers in the control group (Saline+SARS-CoV-2) was 1.3×10⁶ PFU/ml; whereas for the groups receiving the test articles, the average viral titers were; 9.5×10⁵ (AC001888); 4.9×10⁶ (AC001961) and 4.1×10⁶ (AC001888+AC001961) PFU/ml. No virus was detected at day 7 post infection in any of the groups. FIG. 11 represents the viral titer normalized to the weight of the tissue and expressed as PFU/gram of lung tissue. Viral load in lungs of saline and test article treated and SARS-CoV-2 infected hamsters showed comparable viral load (FIGS. 10 and 11).

[0373] Viral genomic and subgenomic RNA copies were quantitated by RT-PCR using CDC recommended primers and probes set in the lung homogenate at day 3 and 7 post infection (FIGS. 12 and 13). The primer and probe set amplified the nucleoprotein (N) region of SARS-CoV-2 for genomic RNA copies, whereas the primer and probe set amplified the envelope (E) region for subgenomic RNA copies.

[0374] At day 3 post infection, the average genomic copies in the control group (Saline+SARS-CoV-2) was 10.9 logs/100 mg of lung tissue, whereas, among the test article groups, the average genomic copies measured were 10.6 (AC001888); 10.7 (AC001961) and 10.4 (AC001888+AC001961) logs/100 mg of lung tissue. The subgenomic RNA copies were approximately 2 logs lower than the genomic copies. The average subgenomic copies in the control group was 9.1 logs/100 mg of lung tissue, whereas, among the test article groups, the average subgenomic copies measured were 8.8 (AC001888); 8.9 (AC001961) and 8.8 (AC001888+AC001961) logs/100 mg of lung tissue.

[0375] The genomic and subgenomic viral RNA copies were also detected in lung tissues obtained at day 7 post infection. The levels were 2 to 3 logs lower than that observed on day 3 post infection. The average genomic copies in the control group were 7.9 logs/100 mg of lung tissue, whereas, among the test article groups, the average genomic copies measured were 7.9 (AC001888); 8 (AC0001961) and 8.4 (AC001888+AC001961) logs/100 mg of lung tissue. The average subgenomic copies in the control group at day 7 post infection was 6.1 logs/100 mg of lung tissue, whereas, among the test article groups, the average subgenomic copies measured were 6 (AC001888); 6.3 (AC001961) and 6.5 (AC001888+AC001961) logs/100 mg of lung tissue.

### Example 14. Testing of CoV RNAi Agents in Golden Syrian Hamsters Against SARS-CoV-2 Infection

[0376] SARS-CoV-2, USA-WA1/2020 strain (Gen Bank: MN985325.1) was obtained from BEI Resources (NR-52281). Passage 6 (P6) of SARS-CoV-2 was generated by infecting Vero E6 cells obtained from the American Type Culture Collection (ATCC, CRL-1586) for 72 h. At 72 h post-infection, tissue culture supernatants were collected, clarified, aliquoted, and stored at −80° C. A standard plaque assay (plaque forming units, PFU/ml) in Vero E6 cells was be used to titrate P6 viral stocks. P6 working stock was sequenced and was compared to the original stock for deletions or mutations compromising virus infectivity as provided by BEI Resources.

[0377] Six-eight weeks old male golden Syrian hamsters were purchased from Charles River Laboratories (Wilmington, MA.). Hamsters were provided sterile water and chow ad libitum and acclimatized for at least one week prior to experimental manipulation. Baseline body weights were measured before infection. Hamsters were infected intranasally (i.n., 50 μl per nostril) with 1×10⁴ PFU of SARS-CoV-2 in a final volume of 100 μl following isoflurane sedation.

[0378] Hamsters were housed in micro-isolator cages at the ABSL3. Hamsters were provided sterile water and chow ad libitum and acclimatized for at least one week prior to experimental manipulation. Baseline body weights were measured before treatment for RNAi dose calculations. Hamsters were treated by intra-tracheal route on day (−7) and (−5) before infection following isoflurane sedation. Hamsters were monitored and body weight recorded. On study day 0 (5 days post second RNAi treatment) hamsters were infected intranasally (i.n., 50 μl per nostril) with 1×10⁴ PFU of SARS-CoV-2 in a final volume of 100 μl following isoflurane sedation. Hamsters were monitored and body weight recorded up to day 7 post infection. On day 3 and 7 post infection, hamsters were euthanized by intra-peritoneal injection of pentobarbital overdose (Fatal plus).

TABLE 30
CoV RNAi agent dosing for animal test groups.

| | RNAi Agent | Number of | Treatment | | Challenge (Intranasal), |
|---|---|---|---|---|---|
| Experimental Group | Dose | Animals | Day | Route | at Day 0 |
| 1. Naïve, no infection | N/A | 3 | Day −7, −5 | Intratracheal | N/A |
| 2. Saline, no infection | N/A | 3 | Day −7, −5 | Intratracheal | N/A |
| 3. Saline, SARS-CoV-2 | N/A | 16 | Day −7, −5 | Intratracheal | SARS-CoV-2, 1 × 10⁴ PFU |
| 4. AC002623, SARS-CoV-2 | 5 mg/kg | 16 | Day −7, −5 | Intratracheal | SARS-CoV-2, 1 × 10⁴ PFU |
| 5. AC002622, SARS-CoV-2 | 5 mg/kg | 16 | Day −7, −5 | Intratracheal | SARS-CoV-2, 1 × 10⁴ PFU |
| 6. AC002619, SARS-CoV-2 | 5 mg/kg | 16 | Day −7, −5 | Intratracheal | SARS-CoV-2, 1 × 10⁴ PFU |
| 7. AC001927 (RISC-blocked), | 5 mg/kg | 16 | Day −7, −5 | Intratracheal | SARS-CoV-2, 1 × 10⁴ PFU |
| SARS-CoV-2 | | | | | |
| 8. AC002617, SARS-CoV-2 | 5 mg/kg | 16 | Day −7, −5 | Intratracheal | SARS-CoV-2, 1 × 10⁴ PFU |
| 9. AC002618, SARS-CoV-2 | 5 mg/kg | 16 | Day −7, −5 | Intratracheal | SARS-CoV-2, 1 × 10⁴ PFU |
| 10. AC002620, SARS-CoV-2 | 5 mg/kg | 16 | Day −7, −5 | Intratracheal | SARS-CoV-2, 1 × 10⁴ PFU |
| 11. AC002621, SARS-CoV-2 | 5 mg/kg | 16 | Day −7, −5 | Intratracheal | SARS-CoV-2, 1 × 10⁴ PFU |

[0379] AC002617 and AC002618 each include an antisense strand nucleotide sequence targeting position 6412 of the SARS-CoV-2 genome; AC002619 includes an antisense strand nucleotide sequence targeting position 29150 of the SARS-CoV-2 genome; AC002620 includes an antisense strand nucleotide sequence targeting position 4917 of the SARS-CoV-2 genome; AC002621 includes an antisense strand nucleotide sequence targeting position 4156 of the SARS-CoV-2 genome; AC002622 includes an antisense strand nucleotide sequence targeting position 15886 of the SARS-CoV-2 genome; and AC002623 includes an antisense strand nucleotide sequence targeting position 14503 of the SARS-CoV-2 genome.

[0380] Trachea were cannulated and secured with 2-0 or 1-0 suture. The lung was harvested in monobloc without heart, lobes rinsed with PBS and blotted dry, while avoiding getting PBS into airways. Left bronchus was clamped with mosquito, ligated and left lung lobe was cut longitudinally and both halves were weighed. One half of the lobe was collected in a cryovial for RNA isolation using Trizol homogenization. SARS-CoV-2 RNA was measured with CDC recommended N1 probe for genomic copies and probe in E for subgenomic RNA copies, by real-time reverse transcriptase qPCR (RT-qPCR). The other half of the left lung lobe was collected in PBS and homogenized aliquots were frozen at −80 C for PFU measurement.

[0381] Right lungs were inflated with gravity instillation of 10% neutral buffered formalin fixative maintaining 23-25 cm H₂O pressure with fixative for 5 minutes to prevent collapse, ligated to keep fixative in lung, and submerged in over 10× volumes of fixative for 7 days at room temperature. Ligatures were removed and tissue rinsed with PBS. Further processing into paraffin blocks was to measure inflammation, perform immunohistochemistry of viral proteins (TBD), and for RNA scope detection of viral RNA.

[0382] The hamsters in groups 3-6 were treated as one cohort. Hamsters were daily weighed just before the saline/test article treatment i.e. 7 days before SARS-CoV-2 infection (day 0) until the end of the study. Body weight at day −7 was used to calculate % body weight gain/loss in the pre-infection phase. Hamsters in all experimental groups continued to gain weight and showed no signs of morbidity post saline or test articles treatment. All hamsters remained healthy throughout the duration treatment (up to the day of virus challenge). As shown in FIG. 14, the groups receiving saline (n=16) had an average weight gain of 8.6%, whereas groups receiving AC002623 (n=16), AC002622 (n=16) and AC002619 (n=16) had an average weight gain of 10.3, 10.5 and 10.9% respectively on day 7 post first treatment.

[0383] After SARS-CoV-2 infection, hamsters in saline group showed an average body weight loss of 7.4%, whereas hamsters in AC002623, AC002622 and AC002619 showed an average body weight loss of 6.6%, 5.8% and 5.9% by day 3 post infection respectively (n=16/group). On day 6 post infection, hamsters in saline, AC002623, AC002622 and AC002619 showed an average body weight loss of 7.5%, 4.75%, 2.8% and 1.7% respectively (n=8/group; FIG. 15). Body weight at day 0 was used to calculate % body weight gain/loss in post infection phase.

[0384] The genomic and subgenomic CoV viral copy levels 3 days post infection are shown in FIGS. 16A and 16B, respectively. As shown in FIG. 16A, CoV RNAi agents AC002622 and AC002619 both demonstrate significant reduction of CoV genomic viral RNA 3 days post CoV infection. At day 3 post infection, the average genomic copies in the control group (Saline+SARS-CoV-2) was 10.0 logs/100 mg of lung tissue, whereas, among the test article groups, the average genomic copies measured were 9.9 (AC002623); 9.6 (AC002622) and 9.4 (AC002619) logs/100 mg of lung tissue. The subgenomic RNA copies were approximately 2 logs lower than the genomic copies. The average subgenomic copies in the control group was 8.4 logs/100 mg of lung tissue, whereas, among the test article groups, the average subgenomic copies measured were 8.5 (AC002623); 8.2 (AC002622) and 8.1 (AC002619) logs/100 mg of lung tissue.

[0385] The genomic and subgenomic CoV viral copy levels 7 days post infection are shown in FIGS. 17A and 17B, respectively. The average genomic copies in the control group were 8.1 logs/100 mg of lung tissue, whereas, among the test article groups, the average genomic copies measured were 7.8 (AC002623), 7.8 (AC002622) and 7.5 (AC002619) logs/100 mg of lung tissue. The average subgenomic copies in the control group at day 7 post infection was 6.4 logs/100 mg of lung tissue, whereas, among the test article groups, the average subgenomic copies measured were 6.2 (AC002623), 6.1 (AC002622) and 6.0 (AC002619) logs/100 mg of lung tissue.

[0386] The viral titers determined by plaque assay in PFU/ml as described in Example 13 are shown in FIG. 18A. At day 3 post infection, the average viral titers in the control group (Saline+SARS-CoV-2) was 5.5 log 10 PFU/ml; whereas for the groups receiving the test articles, the average viral titers were 5.4 log 10 (AC002623); 5.2 log 10 (AC002622) and 5.3 log 10 (AC002619) PFU/ml. FIG. 18B represents the viral titer normalized to the weight of the tissue and expressed as PFU/gram of lung tissue. The average viral load in lungs of the control group infected hamsters (Saline+SARS-CoV-2) at day 3 post infection was 6.2 log 10 PFU/g and in the groups receiving the test articles were 6.1 log 10 (AC002623); 5.8 log 10 (AC002622) and 6.2 log 10 (AC002619) PFU/g. On Day 7 post infection, no virus was detected by plaque assay.

[0387] The hamsters in groups 7-11 were treated as a separate cohort. In this cohort the trigger employed specific chemical modifications to block the antisense strand from RISC-loading (AC001927), which served as a control. As such, AC001927 was unable to initiate RISC and RNAi-mediated gene expression silencing. Hamsters were daily weighed just before the saline/test article treatment i.e. 7 days before SARS-CoV-2 infection (day 0) until the end of the study. Body weight at day −7 was used to calculate % body weight gain/loss in the pre-infection phase. Hamsters in all experimental groups continued to gain weight and showed no signs of morbidity post control trigger or test articles treatment. All hamsters remained healthy throughout the duration treatment (up to the day of virus challenge). As shown in FIG. 19A, the groups receiving blocked control AC001927 (n=16) had an average weight gain of 17.3%, whereas groups receiving AC002617 (n=16), AC002618 (n=16), AC002620 (n=16) and AC002621 (n=16) had an average weight gain of 28.8, 19.8, 18.4 and 17.9, respectively, on day 7 post first treatment.

[0388] After SARS-CoV-2 infection, hamsters in AC001927 control group showed an average body weight loss of 2.2%, whereas hamsters treated with AC002617, AC002618, AC002620 and AC002621 showed an average body weight loss of 2.3%, −0.6% (Gaining weight), 1.4% and −3.1% (Gaining weight) by day 3 post infection, respectively (n=16/group). On day 7 post infection, hamsters receiving AC001927, AC002617, AC002618, AC002620 and AC002621 showed an average body weight loss of 10.2%, 9.4%, 6.1%, 8.6% and −1.1% (Gaining weight), respectively (n=8/group; FIG. 19B). Body weight at day 0 was used to calculate % body weight gain/loss in post infection phase.

[0389] The genomic and subgenomic CoV viral copy levels 3 days post infection are shown in FIGS. 20A and 20B, respectively. CoV RNAi agents AC002617, AC002618, AC002620, and AC002621 all demonstrate significant reduction of both CoV genomic and subgenomic viral RNA 3 days post CoV infection. At day 3 post infection, the average genomic copies in the control group (AC001927+SARS-CoV-2) was 11.4 logs/100 mg of lung tissue, whereas, among the test article groups, the average genomic copies measured were 10.3 (AC002617), 10.4 (AC002618), 10.4 (AC002620) and 10.0 (AC002621) logs/100 mg of lung tissue. The subgenomic RNA copies were approximately 2 logs lower than the genomic copies. The average subgenomic copies in the control AC001927 group was 9.6 logs/100 mg of lung tissue, whereas, among the test article groups, the average subgenomic copies measured were 9.2 (AC002617), 9.1 (AC002618), 9.1 (AC002620) and 8.6 (AC002621) logs/100 mg of lung tissue.

[0390] The genomic and subgenomic CoV viral copy levels 7 days post infection are shown in FIGS. 21A and 21B, respectively. The average genomic copies in the control group were 8.4 logs/100 mg of lung tissue, whereas, among the test article groups, the average genomic copies measured were 8.6 (AC002617), 7.8 (AC002618), 8.1 (AC002620) and 7.9 (AC002621) logs/100 mg of lung tissue. The average subgenomic copies in the control group at day 7 post infection was 6.6 logs/100 mg of lung tissue, whereas, among the test article groups, the average subgenomic copies measured were 6.8 (AC002617), 6.0 (AC002618), 6.6 (AC002620) and 6.2 (AC002621) logs/100 mg of lung tissue.

[0391] The viral titers determined by plaque assay in PFU/ml as described in Example 13 are shown in FIG. 21C. At day 3 post infection, the average viral titers in the control AC001927 group was 5.3 log 10 PFU/ml; whereas for the groups receiving the test articles, the average viral titers were 5.2 log 10 (AC002617); 4.8 log 10 (AC002618); 5.1 log 10 (AC002620) and 4.3 log 10 (AC002621) PFU/ml. FIG. 21D represents the viral titer normalized to the weight of the tissue and expressed as PFU/gram of lung tissue. The average viral load in lungs of the control AC001927 group infected hamsters at day 3 post infection was 5.87 log 10 PFU/g and in the groups receiving the test articles were 6 log 10 (AC002617); 5.5 log 10 (AC002618); 5.7 log 10 (AC002620) and 5.1 log 10 (AC002621) PFU/g. On Day 7 post infection, no virus was detected by plaque assay.

[0392] Inflammation in hamster lung tissue was measured from hematoxylin and eosin (H&E) staining of right superior lobe tissue sections followed by HALO quantitation. FIG. 22A shows group averages of the total pulmonary inflammation as a percentage of the tissue on Day 7 after infection in hamsters that were naïve and uninfected (1.9%), uninfected saline controls (1.3%), infected saline controls (30.2%), treated with RISC-blocked negative control AC001927 and infected (39.3%), and groups treated with CoV RNAi agents AC002617 (32.2%), AC002618 (18.4%), AC002620 (31.2%), and AC002621 (3.5%). FIG. 22B shows the percentage of the alveolar lung area with inflammation in naïve and uninfected (2.1%), uninfected saline controls (1.4%), infected saline controls (35.2%), treated with RISC-blocked negative control AC001927 and infected (48.7%), and groups treated with CoV RNAi agents AC002617 (39.9%), AC002618 (20.9%), AC002620 (37.2%), and AC002621 (3.7%). Syrian golden hamsters infected with SARS-CoV-2, upon treatment with the CoV RNAi agent AC002621, showed significant reduction in pulmonary inflammation in both total area and alveolar area.

[0393] Superior lobe tissue sections stained with H&E are shown in FIGS. 23 and 24. FIG. 23A shows pulmonary tissue of the uninfected naïve and saline-injected hamsters. FIG. 23B demonstrates that three days post-infection the lungs of hamsters injected with RISC-blocked AC001927 were similarly inflamed to those of saline-injected and infected hamsters. FIGS. 23C, 23D, 23E and 23F show the superior lobe of the hamster lungs infected with SARS-CoV-2, subsequent treatment with the CoV RNAi agents, at 3 days post infection, compared to the saline control treated with SARS-CoV-2. The CoV RNAi agent AC002621 (FIG. 23F) achieved significant reduction in lung inflammation. More specifically, AC002621 demonstrates marked reduction in lung inflammation compared to the other CoV RNAi agents in this study.

[0394] FIGS. 24A, 24B, 24C, 24D, and 24E show the superior lobe of the hamster lungs infected with SARS-CoV-2, subsequent treatment with RISC-blocked negative control AC001927 (FIG. 24A) or the CoV RNAi agents, at 7 days post infection, compared to the saline control treated with SARS-CoV-2. Inflammation in hamsters treated with the negative control AC001927 was similar to that in hamsters injected with saline (FIG. 24A). As shown these five Figures, the CoV RNAi agent AC002621 (FIG. 24E) demonstrates marked reduction in lung inflammation compared to the other CoV RNAi agents.

### Example 15. Testing of CoV RNAi Agents in Golden Syrian Hamsters Against SARS-CoV-2 Infection

[0395] Golden Syrian hamsters are described as a suitable model to test vaccines and therapeutics for the treatment of SARS-CoV-2 infection. The hamster model of SARS-CoV-2 infection shows signs of weight loss (morbidity), viral replication in the lungs and nasal turbinate, and significant histopathology changes including immune cell infiltration into the lungs. SARS-CoV-2 infection in the hamster model mimics mild SARS-CoV-2 infections reported in humans, and, therefore represents an excellent tool to test anti-SARS-CoV-2 agents (Chen et al, 2020; Imai et al, 2020).

[0396] Thirteen (13) week old male Syrian golden hamsters were selected for this study. Animals were distributed to the experimental groups as shown in Tables 31 and 32. Animals were administered with either saline or test article (2 ml/kg) via the intra-tracheal route on days −14 and −12. The hamsters were challenged 14 days post first administration of test articles, with 1×10⁵ PFU of SARS-CoV-2 (day 0). Hamsters were weighed daily and dosing volume was calculated and adjusted as weight changed for individual hamster. Animals were monitored for morbidity and mortality during the study and were euthanized on days 3 and 7 post infection.

[0397] Upon euthanasia, lung tissue was harvested. Right lung lobes were separated from the main bronchus, cut in half, and further processed for RNA isolation and viral RNA qPCR analysis. Left lung was fixed processed for RNA scope and immunohistochemistry.

TABLE 31
CoV RNAi agent dosing for animal test groups, euthanized at 3 days post-infection.

| | | Number of | Treatment | | |
|---|---|---|---|---|---|
| Experimental Group | RNAi Agent Dose | Animals | Day | Route | Challenge (Intranasal) |
| Saline + SARS-CoV-2 | N/A | 8 | Day −14, −12 | Intratracheal | SARS-CoV-2, 5 × 10⁴ PFU/nostril |
| AC000234 + SARS-CoV-2 | 5 mg/kg | 8 | Day −14, −12 | Intratracheal | SARS-CoV-2, 5 × 10⁴ PFU/nostril |
| AC000234 + AC001888 + | 2.5 mg/kg AC000234, | 8 | Day −14, −12 | Intratracheal | SARS-CoV-2, 5 × 10⁴ PFU/nostril |
| SARS-CoV-2 | 2.5 mg/kg AC001888 | | | | |
| AC001888 + SARS-CoV-2 | 5 mg/kg | 8 | Day −14, −12 | Intratracheal | SARS-CoV-2, 5 × 10⁴ PFU/nostril |

TABLE 32
CoV RNAi agent dosing for animal test groups, euthanized at 7 days post-infection.

| | | Number of | Treatment | | |
|---|---|---|---|---|---|
| Experimental Group | RNAi Agent Dose | Animals | Day | Route | Challenge (Intranasal) |
| Saline* | N/A | 1 | Day −14, −12 | Intratracheal | N/A |
| Saline + SARS-CoV-2 | N/A | 8 | Day −14, −12 | Intratracheal | SARS-CoV-2, 5 × 10⁴ PFU/nostril |
| AC000234 + SARS-CoV-2 | 5 mg/kg | 8 | Day −14, −12 | Intratracheal | SARS-CoV-2, 5 × 10⁴ PFU/nostril |
| AC000234 + AC001888 + | 2.5 mg/kg AC000234, | 8 | Day −14, −12 | Intratracheal | SARS-CoV-2, 5 × 10⁴ PFU/nostril |
| SARS-CoV-2 | 2.5 mg/kg AC001888 | | | | |
| AC001888 + SARS-CoV-2 | 5 mg/kg | 8 | Day −14, −12 | Intratracheal | SARS-CoV-2, 5 × 10⁴ PFU/nostril |

*Euthanized on post infection Day 6.

[0398] From Day −14 to +7, body weight measurements were collected for all of the experimental groups as well as the saline group. The body weights over time for all of the experimental groups are shown in FIG. 25A. When compared to the saline group infected with SARS-CoV-2, all of the experimental groups dosed with the CoV RNAi agents showed improved body weight recovery. Body weight recovered more quickly in groups treated with AC000234 COV RNAi agent than from AC001888 CoV RNAi agent alone.

[0399] FIG. 25B shows the total pulmonary inflammation area of the experimental groups treated with the CoV RNAi agents, in comparison with the non-treated saline. As shown in FIG. 25B, Syrian golden hamsters infected with SARS-CoV-2, upon treatment with the CoV RNAi agents, showed reduction in total area of pulmonary inflammation for all of the experimental groups treated with the CoV RNAi agents.

[0400] FIGS. 25C, 25D, 25E, and 25F show the genomic and subgenomic RNA levels at 3 and 7 days post infection by SARS-CoV-2. At Day 3 post infection, AC001888 achieved roughly 77% reduction in genomic RNA and 70% reduction in subgenomic RNA. At Day 7 post infection, AC000234 achieved roughly 85% reduction in genomic RNA and 87% reduction in subgenomic RNA, and AC001888 achieved roughly 96% reduction in both genomic and subgenomic RNA.

[0401] AC000234 is an RNAi agent designed to initiate RISC and RNAi in transmembrane serine protease 2 (TMPRSS2), and is not targeted to the SARS-CoV-2 viral genome.

### Example 16. In Vivo Testing of CoV RNAi Agents in SARS-CoV-2-SEAP Mice

[0402] The SARS-CoV-2-SEAP mouse model described in Example 2, above, was used. At day 1, four (n=4) female C57bl/6 albino mice were given a single subcutaneous (SQ) injection of 200 μl per 20 g body weight containing either 1.0 mg/kg (mpk) of an CoV RNAi agent or saline without an CoV RNAi agent to be used as a control, according to the following Table 33.

TABLE 33
CoV RNAi agent and Dosing for Example 16

| Group ID | Dosing Regimen |
|---|---|
| Group 1 (isotonic saline) | Single SQ injection on day 1 |
| Group 2 1 mg/kg AD11122 | Single SQ injection on day 1 |
| Group 3 1 mg/kg AD13311 | Single SQ injection on day 1 |
| Group 4 1 mg/kg AD13312 | Single SQ injection on day 1 |
| Group 5 1 mg/kg AD13313 | Single SQ injection on day 1 |
| Group 6 1 mg/kg AD13314 | Single SQ injection on day 1 |
| Group 7 1 mg/kg AD13315 | Single SQ injection on day 1 |
| Group 8 1 mg/kg AD13316 | Single SQ injection on day 1 |
| Group 9 1 mg/kg AD13317 | Single SQ injection on day 1 |
| Group 10 1 mg/kg AD13318 | Single SQ injection on day 1 |
| Group 11 1 mg/kg AD13319 | Single SQ injection on day 1 |
| Group 12 1 mg/kg AD13320 | Single SQ injection on day 1 |

[0403] Each of the CoV RNAi agents included N-acetyl-galactosamine targeting ligands ((NAG37)s) conjugated to the 5′-terminal end of the sense strand, as shown in Tables 5, 7A, and 11 and were added as phosphoramidite compounds during the oligonucleotide synthesis process described above in Example 1.

[0404] The injections were performed between the skin and muscle (i.e. subcutaneous injections) into the loose skin over the neck and shoulder area. Four (4) mice in each group were tested (n=4). Serum was collected on day 1, day 8, day 15, day 22, and day 29, and SEAP expression levels were determined pursuant to the procedure set forth in Example 2, above. Data from the experiment are shown in the following Table 34, with Average SEAP reflecting the normalized average value of SEAP:

TABLE 34
Average SEAP normalized to pre-treatment and saline
control in SARS-CoV-2 -SEAP mice from Example 16.

| | Day 1 | | Day 8 | |
|---|---|---|---|---|
| | Avg | Std Dev | Avg | Std Dev |
| Group ID | SEAP | (+/−) | SEAP | (+/−) |
| Group 1 (isotonic saline) | 1.000 | 0.000 | 1.000 | 0.096 |
| Group 2 1 mg/kg AD11122 | 1.000 | 0.000 | 0.579 | 0.144 |
| Group 3 1 mg/kg AD13311 | 1.000 | 0.000 | 0.580 | 0.078 |
| Group 4 1 mg/kg AD13312 | 1.000 | 0.000 | 0.430 | 0.070 |
| Group 5 1 mg/kg AD13313 | 1.000 | 0.000 | 0.311 | 0.036 |
| Group 6 1 mg/kg AD13314 | 1.000 | 0.000 | 0.549 | 0.116 |
| Group 7 1 mg/kg AD13315 | 1.000 | 0.000 | 0.407 | 0.076 |
| Group 8 1 mg/kg AD13316 | 1.000 | 0.000 | 0.398 | 0.111 |
| Group 9 1 mg/kg AD13317 | 1.000 | 0.000 | 0.330 | 0.026 |
| Group 10 1 mg/kg AD13318 | 1.000 | 0.000 | 0.245 | 0.021 |
| Group 11 1 mg/kg AD13319 | 1.000 | 0.000 | 0.492 | 0.060 |
| Group 12 1 mg/kg AD13320 | 1.000 | 0.000 | 0.351 | 0.080 |
| | Day 15 | | Day 22 | |
| | Avg | Std Dev | Avg | Std Dev |
| Group ID | SEAP | (+/−) | SEAP | (+/−) |
| Group 1 (isotonic saline) | 1.000 | 0.574 | 1.000 | 0.464 |
| Group 2 1 mg/kg AD11122 | 0.777 | 0.273 | 0.509 | 0.217 |
| Group 3 1 mg/kg AD13311 | 0.662 | 0.134 | 0.495 | 0.195 |
| Group 4 1 mg/kg AD13312 | 0.486 | 0.110 | 0.340 | 0.078 |
| Group 5 1 mg/kg AD13313 | 0.347 | 0.065 | 0.265 | 0.074 |
| Group 6 1 mg/kg AD13314 | 0.511 | 0.167 | 0.372 | 0.135 |
| Group 7 1 mg/kg AD13315 | 0.438 | 0.097 | 0.371 | 0.141 |
| Group 8 1 mg/kg AD13316 | 0.348 | 0.137 | 0.307 | 0.146 |
| Group 9 1 mg/kg AD13317 | 0.392 | 0.071 | 0.424 | 0.252 |
| Group 10 1 mg/kg AD13318 | 0.251 | 0.012 | 0.250 | 0.070 |
| Group 11 1 mg/kg AD13319 | 0.562 | 0.041 | 0.405 | 0.112 |
| Group 12 1 mg/kg AD13320 | 0.402 | 0.115 | 0.312 | 0.082 |

[0405] Each of the CoV RNAI agents in each of the dosing groups (i.e., Groups 2 through 12) showed some reduction in SEAP as compared to the saline control (Group 1) across all measured time points, which as described herein, indicates inhibition of SARS-CoV-2 in the SARS-CoV-2-SEAP mouse model.

### Example 17. In Vivo Testing of CoV RNAi Agents in SARS-CoV-2-SEAP Mice

[0406] The SARS-CoV-2-SEAP mouse model described in Example 2, above, was used. At day 1, four (n=4) female C57bl/6 albino mice were given a single subcutaneous (SQ) injection of 200 μl per 20 g body weight containing either 1.0 mg/kg (mpk) of an CoV RNAi agent or saline without an CoV RNAi agent to be used as a control, according to the following Table 35.

TABLE 35
CoV RNAi agent and Dosing for Example 17

| Group ID | Dosing Regimen |
|---|---|
| Group 1 (isotonic saline) | Single SQ injection on day 1 |
| Group 2 1 mg/kg AD11122 | Single SQ injection on day 1 |
| Group 3 1 mg/kg AD13311 | Single SQ injection on day 1 |
| Group 4 1 mg/kg AD13321 | Single SQ injection on day 1 |
| Group 5 1 mg/kg AD13333 | Single SQ injection on day 1 |
| Group 6 1 mg/kg AD13373 | Single SQ injection on day 1 |
| Group 7 1 mg/kg AD11101 | Single SQ injection on day 1 |
| Group 8 1 mg/kg AD13483 | Single SQ injection on day 1 |
| Group 9 1 mg/kg AD13484 | Single SQ injection on day 1 |
| Group 10 1 mg/kg AD13485 | Single SQ injection on day 1 |
| Group 11 1 mg/kg AD10538 | Single SQ injection on day 1 |

[0407] Each of the CoV RNAi agents included N-acetyl-galactosamine targeting ligands ((NAG37)s) conjugated to the 5′-terminal end of the sense strand, as shown in Tables 5, 7A, and 11 and were added as phosphoramidite compounds during the oligonucleotide synthesis process described above in Example 1.

[0408] The injections were performed between the skin and muscle (i.e. subcutaneous injections) into the loose skin over the neck and shoulder area. Four (4) mice in each group were tested (n=4). Serum was collected on day 1, day 8, day 15, and day 22, and SEAP expression levels were determined pursuant to the procedure set forth in Example 2, above. Data from the experiment are shown in the following Table 36, with Average SEAP reflecting the normalized average value of SEAP:

TABLE 36
Average SEAP normalized to pre-treatment and saline
control in SARS-CoV-2 -SEAP mice from Example 17.

| | Day 1 | | Day 8 | |
|---|---|---|---|---|
| | Avg | Std Dev | Avg | Std Dev |
| Group ID | SEAP | (+/−) | SEAP | (+/−) |
| Group 1 (isotonic saline) | 1.000 | 0.000 | 1.000 | 0.382 |
| Group 2 1 mg/kg AD11122 | 1.000 | 0.000 | 0.553 | 0.087 |
| Group 3 1 mg/kg AD13311 | 1.000 | 0.000 | 0.676 | 0.234 |
| Group 4 1 mg/kg AD13321 | 1.000 | 0.000 | 0.502 | 0.100 |
| Group 5 1 mg/kg AD13333 | 1.000 | 0.000 | 0.525 | 0.045 |
| Group 6 1 mg/kg AD13373 | 1.000 | 0.000 | 0.543 | 0.173 |
| Group 7 1 mg/kg AD11101 | 1.000 | 0.000 | 0.683 | 0.085 |
| Group 8 1 mg/kg AD13483 | 1.000 | 0.000 | 0.610 | 0.263 |
| Group 9 1 mg/kg AD13484 | 1.000 | 0.000 | 0.484 | 0.253 |
| Group 10 1 mg/kg AD13485 | 1.000 | 0.000 | 0.469 | 0.054 |
| Group 11 1 mg/kg AD10538 | 1.000 | 0.000 | 0.743 | 0.025 |
| | Day 15 | | Day 22 | |
| | Avg | Std Dev | Avg | Std Dev |
| Group ID | SEAP | (+/−) | SEAP | (+/−) |
| Group 1 (isotonic saline) | 1.000 | 0.519 | 1.000 | 0.479 |
| Group 2 1 mg/kg AD11122 | 0.358 | 0.089 | 0.381 | 0.146 |
| Group 3 1 mg/kg AD13311 | 0.713 | 0.161 | 0.705 | 0.156 |
| Group 4 1 mg/kg AD13321 | 0.348 | 0.117 | 0.457 | 0.178 |
| Group 5 1 mg/kg AD13333 | 0.406 | 0.093 | 0.559 | 0.243 |
| Group 6 1 mg/kg AD13373 | 0.363 | 0.076 | 0.374 | 0.141 |
| Group 7 1 mg/kg AD11101 | 0.494 | 0.096 | 0.528 | 0.100 |
| Group 8 1 mg/kg AD13483 | 0.742 | 0.717 | 0.447 | 0.189 |
| Group 9 1 mg/kg AD13484 | 0.302 | 0.112 | 0.444 | 0.218 |
| Group 10 1 mg/kg AD13485 | 0.309 | 0.073 | 0.298 | 0.102 |
| Group 11 1 mg/kg AD10538 | 0.582 | 0.071 | 0.639 | 0.171 |

[0409] Each of the CoV RNAi agents in each of the dosing groups (i.e., Groups 2 through 11) showed certain reductions in SEAP as compared to the saline control (Group 1) across all measured time points, which as described herein, indicates inhibition of SARS-CoV-2 in the SARS-CoV-2-SEAP mouse model.

### Example 18. In Vivo Testing of CoV RNAi Agents in SARS-CoV-2-SEAP Mice

[0410] The SARS-CoV-2-SEAP mouse model described in Example 2, above, was used. At day 1, four (n=4) female C57bl/6 albino mice were given a single subcutaneous (SQ) injection of 200 μl per 20 g body weight containing either 0.5 mg/kg (mpk), or 1.0 mg/kg (mpk) of an CoV RNAi agent or saline without an CoV RNAi agent to be used as a control, according to the following Table 37.

TABLE 37
CoV RNAi agent and Dosing for Example 18

| Group ID | Dosing Regimen |
|---|---|
| Group 1 (isotonic saline) | Single SQ injection on day 1 |
| Group 2 0.5 mg/kg AD13311 | Single SQ injection on day 1 |
| Group 3 0.5 mg/kg AD13313 | Single SQ injection on day 1 |
| Group 4 0.5 mg/kg AD13318 | Single SQ injection on day 1 |
| Group 5 0.5 mg/kg AD11101 | Single SQ injection on day 1 |
| Group 6 0.5 mg/kg AD13484 | Single SQ injection on day 1 |
| Group 7 0.5 mg/kg AD13485 | Single SQ injection on day 1 |
| Group 8 1 mg/kg AD13311 | Single SQ injection on day 1 |
| Group 9 1 mg/kg AD13313 | Single SQ injection on day 1 |
| Group 10 1 mg/kg AD13318 | Single SQ injection on day 1 |
| Group 11 1 mg/kg AD11101 | Single SQ injection on day 1 |
| Group 12 1 mg/kg AD13484 | Single SQ injection on day 1 |
| Group 13 1 mg/kg AD13485 | Single SQ injection on day 1 |

[0411] Each of the CoV RNAi agents included N-acetyl-galactosamine targeting ligands ((NAG37)s) conjugated to the 5′-terminal end of the sense strand, as shown in Tables 5, 7A, and 11 and were added as phosphoramidite compounds during the oligonucleotide synthesis process described above in Example 1.

[0412] The injections were performed between the skin and muscle (i.e. subcutaneous injections) into the loose skin over the neck and shoulder area. Four (4) mice in each group were tested (n=4). Serum was collected on day 1, day 8, day 15, and day 22, and SEAP expression levels were determined pursuant to the procedure set forth in Example 2, above. Data from the experiment are shown in the following Table 38, with Average SEAP reflecting the normalized average value of SEAP:

TABLE 38
Average SEAP normalized to pre-treatment and saline
control in SARS-CoV-2 -SEAP mice from Example 18.

| | Day 1 | | Day 8 | |
|---|---|---|---|---|
| | Avg | Std Dev | Avg | Std Dev |
| Group ID | SEAP | (+/−) | SEAP | (+/−) |
| Group 1 (isotonic saline) | 1.000 | 0.000 | 1.000 | 0.037 |
| Group 2 0.5 mg/kg AD13311 | 1.000 | 0.000 | 0.603 | 0.112 |
| Group 3 0.5 mg/kg AD13313 | 1.000 | 0.000 | 0.369 | 0.082 |
| Group 4 0.5 mg/kg AD13318 | 1.000 | 0.000 | 0.313 | 0.058 |
| Group 5 0.5 mg/kg AD11101 | 1.000 | 0.000 | 0.667 | 0.142 |
| Group 6 0.5 mg/kg AD13484 | 1.000 | 0.000 | 0.518 | 0.037 |
| Group 7 0.5 mg/kg AD13485 | 1.000 | 0.000 | 0.518 | 0.077 |
| Group 8 1 mg/kg AD13311 | 1.000 | 0.000 | 0.366 | 0.128 |
| Group 9 1 mg/kg AD13313 | 1.000 | 0.000 | 0.235 | 0.053 |
| Group 10 1 mg/kg AD13318 | 1.000 | 0.000 | 0.303 | 0.037 |
| Group 11 1 mg/kg AD11101 | 1.000 | 0.000 | 0.587 | 0.113 |
| Group 12 1 mg/kg AD13484 | 1.000 | 0.000 | 0.597 | 0.090 |
| Group 13 1 mg/kg AD13485 | 1.000 | 0.000 | 0.525 | 0.061 |
| | Day 15 | | Day 22 | |
| | Avg | Std Dev | Avg | Std Dev |
| Group ID | SEAP | (+/−) | SEAP | (+/−) |
| Group 1 (isotonic saline) | 1.000 | 0.164 | 1.000 | 0.585 |
| Group 2 0.5 mg/kg AD13311 | 0.573 | 0.106 | 0.619 | 0.053 |
| Group 3 0.5 mg/kg AD13313 | 0.386 | 0.050 | 0.393 | 0.062 |
| Group 4 0.5 mg/kg AD13318 | 0.304 | 0.069 | 0.340 | 0.089 |
| Group 5 0.5 mg/kg AD11101 | 0.749 | 0.179 | 0.665 | 0.237 |
| Group 6 0.5 mg/kg AD13484 | 0.481 | 0.054 | 0.497 | 0.047 |
| Group 7 0.5 mg/kg AD13485 | 0.525 | 0.123 | 0.473 | 0.166 |
| Group 8 1 mg/kg AD13311 | 0.451 | 0.144 | 0.446 | 0.157 |
| Group 9 1 mg/kg AD13313 | 0.214 | 0.059 | 0.257 | 0.060 |
| Group 10 1 mg/kg AD13318 | 0.259 | 0.050 | 0.266 | 0.074 |
| Group 11 1 mg/kg AD11101 | 0.456 | 0.051 | 0.425 | 0.101 |
| Group 12 1 mg/kg AD13484 | 0.448 | 0.050 | 0.439 | 0.074 |
| Group 13 1 mg/kg AD13485 | 0.495 | 0.059 | 0.486 | 0.092 |

[0413] Each of the CoV RNAi agents in each of the dosing groups (i.e., Groups 2 through 13) showed reduction in SEAP as compared to the saline control (Group 1) across all measured time points, which as described herein, indicates inhibition of SARS-CoV-2 in the SARS-CoV-2-SEAP mouse model.

### Example 19. In Vivo Testing of CoV RNAi Agents in SARS-CoV-2-SEAP Mice

[0414] The SARS-CoV-2-SEAP mouse model described in Example 2, above, was used. At day 1, four (n=4) female C57bl/6 albino mice were given a single subcutaneous (SQ) injection of 200 μl per 20 g body weight containing either 0.5 mg/kg (mpk) of an CoV RNAi agent or saline without an CoV RNAi agent to be used as a control, according to the following Table 39.

TABLE 39
CoV RNAi agent and Dosing for Example 19

| Group ID | Dosing Regimen |
|---|---|
| Group 1 (isotonic saline) | Single SQ injection on day 1 |
| Group 2 0.5 mg/kg AD13311 | Single SQ injection on day 1 |
| Group 3 0.5 mg/kg AD13631 | Single SQ injection on day 1 |
| Group 4 0.5 mg/kg AD13714 | Single SQ injection on day 1 |
| Group 5 0.5 mg/kg AD13313 | Single SQ injection on day 1 |
| Group 6 0.5 mg/kg AD13630 | Single SQ injection on day 1 |
| Group 7 0.5 mg/kg AD13716 | Single SQ injection on day 1 |
| Group 8 0.5 mg/kg AD13318 | Single SQ injection on day 1 |
| Group 9 0.5 mg/kg AD13717 | Single SQ injection on day 1 |
| Group 10 0.5 mg/kg AD13719 | Single SQ injection on day 1 |
| Group 11 0.5 mg/kg AD13720 | Single SQ injection on day 1 |
| Group 12 0.5 mg/kg AD13721 | Single SQ injection on day 1 |

[0415] Each of the CoV RNAi agents included N-acetyl-galactosamine targeting ligands ((NAG37)s) conjugated to the 5′-terminal end of the sense strand, as shown in Tables 5, 7A, and 11 and were added as phosphoramidite compounds during the oligonucleotide synthesis process described above in Example 1. Each of these duplexes incorporated slightly different chemical modifications to sequences targeting position 4156 of the SARS-CoV-2 genome.

[0416] The injections were performed between the skin and muscle (i.e. subcutaneous injections) into the loose skin over the neck and shoulder area. Four (4) mice in each group were tested (n=4). Serum was collected on day 1, day 8, day 15, and day 22, and SEAP expression levels were determined pursuant to the procedure set forth in Example 2, above. Data from the experiment are shown in the following Table 40, with Average SEAP reflecting the normalized average value of SEAP:

TABLE 40
Average SEAP normalized to pre-treatment and saline
control in SARS-CoV-2 -SEAP mice from Example 19.

| | Day 1 | | Day 8 | |
|---|---|---|---|---|
| | Avg | Std Dev | Avg | Std Dev |
| Group ID | SEAP | (+/−) | SEAP | (+/−) |
| Group 1 (isotonic saline) | 1.000 | 0.000 | 1.000 | 0.182 |
| Group 2 0.5 mg/kg AD13311 | 1.000 | 0.000 | 0.693 | 0.122 |
| Group 3 0.5 mg/kg AD13631 | 1.000 | 0.000 | 0.554 | 0.053 |
| Group 4 0.5 mg/kg AD13714 | 1.000 | 0.000 | 0.376 | 0.127 |
| Group 5 0.5 mg/kg AD13313 | 1.000 | 0.000 | 0.325 | 0.071 |
| Group 6 0.5 mg/kg AD13630 | 1.000 | 0.000 | 0.349 | 0.111 |
| Group 7 0.5 mg/kg AD13716 | 1.000 | 0.000 | 0.489 | 0.088 |
| Group 8 0.5 mg/kg AD13318 | 1.000 | 0.000 | 0.438 | 0.092 |
| Group 9 0.5 mg/kg AD13717 | 1.000 | 0.000 | 0.335 | 0.053 |
| Group 10 0.5 mg/kg AD13719 | 1.000 | 0.000 | 0.484 | 0.081 |
| Group 11 0.5 mg/kg AD13720 | 1.000 | 0.000 | 0.440 | 0.115 |
| Group 12 0.5 mg/kg AD13721 | 1.000 | 0.000 | 0.330 | 0.061 |
| | Day 15 | | Day 22 | |
| | Avg | Std Dev | Avg | Std Dev |
| Group ID | SEAP | (+/−) | SEAP | (+/−) |
| Group 1 (isotonic saline) | 1.000 | 0.271 | 1.000 | 0.323 |
| Group 2 0.5 mg/kg AD13311 | 0.597 | 0.074 | 0.617 | 0.068 |
| Group 3 0.5 mg/kg AD13631 | 0.555 | 0.088 | 0.706 | 0.159 |
| Group 4 0.5 mg/kg AD13714 | 0.285 | 0.056 | 0.372 | 0.084 |
| Group 5 0.5 mg/kg AD13313 | 0.277 | 0.069 | 0.367 | 0.153 |
| Group 6 0.5 mg/kg AD13630 | 0.271 | 0.104 | 0.338 | 0.164 |
| Group 7 0.5 mg/kg AD13716 | 0.429 | 0.065 | 0.426 | 0.128 |
| Group 8 0.5 mg/kg AD13318 | 0.341 | 0.083 | 0.411 | 0.095 |
| Group 9 0.5 mg/kg AD13717 | 0.324 | 0.123 | 0.313 | 0.081 |
| Group 10 0.5 mg/kg AD13719 | 0.252 | 0.127 | 0.325 | 0.108 |
| Group 11 0.5 mg/kg AD13720 | 0.229 | 0.071 | 0.407 | 0.156 |
| Group 12 0.5 mg/kg AD13721 | 0.267 | 0.130 | 0.269 | 0.077 |

[0417] Each of the CoV RNAi agents in each of the dosing groups (i.e., Groups 2 through 12) showed reduction in SEAP as compared to the saline control (Group 1) across all measured time points, which as described herein, indicates inhibition of SARS-CoV-2 in the SARS-CoV-2-SEAP mouse model. In particular, CoV RNAi agents AD13721, AD13720, and AD13313 showed particularly potent inhibition at the lower dose level of 0.5 mg/kg, indicating that the particular modifications to the nucleotide sequences provide for improvement over previously identified RNAi agents targeting position 4156 of the SARS-CoV-2 genome. It is anticipated that these RNAi agents for which the sequence modifications provided improvement will translate into improved RNAi agents when tested in other animal models and humans.

### Example 20. In Vivo Testing of CoV RNAi Agents in SARS-CoV-2-SEAP Mice

[0418] The SARS-CoV-2-SEAP mouse model described in Example 2, above, was used. At day 1, four (n=4) female C57bl/6 albino mice were given a single subcutaneous (SQ) injection of 200 μl per 20 g body weight containing either 0.5 mg/kg (mpk) of an CoV RNAi agent or saline without an CoV RNAi agent to be used as a control, according to the following Table 41.

TABLE 41
CoV RNAi agent and Dosing for Example 20

| Group ID | Dosing Regimen |
|---|---|
| Group 1 (isotonic saline) | Single SQ injection on day 1 |
| Group 2 0.5 mg/kg AD11102 | Single SQ injection on day 1 |
| Group 3 0.5 mg/kg AD13722 | Single SQ injection on day 1 |
| Group 4 0.5 mg/kg AD13485 | Single SQ injection on day 1 |
| Group 5 0.5 mg/kg AD13632 | Single SQ injection on day 1 |
| Group 6 0.5 mg/kg AD13725 | Single SQ injection on day 1 |
| Group 7 0.5 mg/kg AD13726 | Single SQ injection on day 1 |
| Group 8 0.5 mg/kg AD13728 | Single SQ injection on day 1 |
| Group 9 0.5 mg/kg AD13729 | Single SQ injection on day 1 |
| Group 10 0.5 mg/kg AD13730 | Single SQ injection on day 1 |
| Group 11 0.5 mg/kg AD13731 | Single SQ injection on day 1 |
| Group 12 0.5 mg/kg AD13733 | Single SQ injection on day 1 |

[0419] Each of the Co RNA agents included N-acetyl-galactosamine targeting ligands ((NAG37)s) conjugated to the 5′-terminal end of the sense strand, as shown in Tables 5, 7A, and 11 and were added as phosphoramidite compounds during the oligonucleotide synthesis process described above in Example 1.

[0420] The injections were performed between the skin and muscle (i.e. subcutaneous injections) into the loose skin over the neck and shoulder area. Four (4) mice in each group were tested (n=4). Serum was collected on day 1, day 8, day 15, and day 22, and SEAP expression levels were determined pursuant to the procedure set forth in Example 2, above. Data from the experiment are shown in the following Table 42, with Average SEAP reflecting the normalized average value of SEAP:

TABLE 42
Average SEAP normalized to pre-treatment and saline
control in SARS-CoV-2 -SEAP mice from Example 20.

| | Day 1 | | Day 8 | |
|---|---|---|---|---|
| | Avg | Std Dev | Avg | Std Dev |
| Group ID | SEAP | (+/−) | SEAP | (+/−) |
| Group 1 (isotonic saline) | 1.000 | 0.000 | 1.000 | 0.113 |
| Group 2 0.5 mg/kg AD11102 | 1.000 | 0.000 | 0.590 | 0.085 |
| Group 3 0.5 mg/kg AD13722 | 1.000 | 0.000 | 0.590 | 0.082 |
| Group 4 0.5 mg/kg AD13485 | 1.000 | 0.000 | 0.621 | 0.071 |
| Group 5 0.5 mg/kg AD13632 | 1.000 | 0.000 | 0.612 | 0.056 |
| Group 6 0.5 mg/kg AD13725 | 1.000 | 0.000 | 0.547 | 0.067 |
| Group 7 0.5 mg/kg AD13726 | 1.000 | 0.000 | 0.611 | 0.074 |
| Group 8 0.5 mg/kg AD13728 | 1.000 | 0.000 | 0.551 | 0.069 |
| Group 9 0.5 mg/kg AD13729 | 1.000 | 0.000 | 0.628 | 0.057 |
| Group 10 0.5 mg/kg AD13730 | 1.000 | 0.000 | 0.519 | 0.245 |
| Group 11 0.5 mg/kg AD13731 | 1.000 | 0.000 | 0.628 | 0.059 |
| Group 12 0.5 mg/kg AD13733 | 1.000 | 0.000 | 0.555 | 0.060 |
| | Day 15 | | Day 22 | |
| | Avg | Std Dev | Avg | Std Dev |
| Group ID | SEAP | (+/−) | SEAP | (+/−) |
| Group 1 (isotonic saline) | 1.000 | 0.159 | 1.000 | 0.302 |
| Group 2 0.5 mg/kg AD11102 | 0.493 | 0.113 | 0.443 | 0.077 |
| Group 3 0.5 mg/kg AD13722 | 0.514 | 0.110 | 0.456 | 0.125 |
| Group 4 0.5 mg/kg AD13485 | 0.562 | 0.098 | 0.459 | 0.098 |
| Group 5 0.5 mg/kg AD13632 | 0.578 | 0.066 | 0.613 | 0.067 |
| Group 6 0.5 mg/kg AD13725 | 0.498 | 0.085 | 0.460 | 0.070 |
| Group 7 0.5 mg/kg AD13726 | 0.544 | 0.117 | 0.481 | 0.083 |
| Group 8 0.5 mg/kg AD13728 | 0.505 | 0.036 | 0.452 | 0.017 |
| Group 9 0.5 mg/kg AD13729 | 0.601 | 0.112 | 0.472 | 0.096 |
| Group 10 0.5 mg/kg AD13730 | 0.473 | 0.211 | 0.411 | 0.191 |
| Group 11 0.5 mg/kg AD13731 | 0.677 | 0.089 | 0.619 | 0.087 |
| Group 12 0.5 mg/kg AD13733 | 0.560 | 0.102 | 0.485 | 0.064 |

[0421] Each of the CoV RNAi agents in each of the dosing groups (i.e., Groups 2 through 12) showed certain reductions in SEAP as compared to the saline control (Group 1) across all measured time points, which as described herein, indicates inhibition of SARS-CoV-2 in the SARS-CoV-2-SEAP mouse model. However, in this study none of the CoV RNAi agents provided particularly robust knockdown compared to previously identified RNAi agents.

### Example 21. In Vivo Testing of CoV RNAi Agents in SARS-CoV-2-SEAP Mice

[0422] The SARS-CoV-2-SEAP mouse model described in Example 2, above, was used. At day 1, four (n=4) female C7bl/6 albino mice were given a single subcutaneous (SQ) injection of 250 μl per 25 g body weight containing either 0.5 mg/kg (mpk) of an CoV RNAi agent or saline without an CoV RNAi agent to be used as a control, according to the following Table 43.

TABLE 43
CoV RNAi agent and Dosing for Example 21

| Group ID | Dosing Regimen |
|---|---|
| Group 1 Saline | Single SQ injection on day 1 |
| Group 2 0.5 mg/kg AD11101 | Single SQ injection on day 1 |
| Group 3 0.5 mg/kg AD11102 | Single SQ injection on day 1 |
| Group 4 0.5 mg/kg AD13485 | Single SQ injection on day 1 |
| Group 5 0.5 mg/kg AD13722 | Single SQ injection on day 1 |
| Group 6 0.5 mg/kg AD13723 | Single SQ injection on day 1 |
| Group 7 0.5 mg/kg AD13724 | Single SQ injection on day 1 |
| Group 8 0.5 mg/kg AD14050 | Single SQ injection on day 1 |
| Group 9 0.5 mg/kg AD13725 | Single SQ injection on day 1 |
| Group 10 0.5 mg/kg AD13727 | Single SQ injection on day 1 |
| Group 11 0.5 mg/kg AD13728 | Single SQ injection on day 1 |
| Group 12 0.5 mg/kg AD14051 | Single SQ injection on day 1 |

[0423] Each of the CoV RNAi agents included N-acetyl-galactosamine targeting ligands ((NAG37)s) conjugated to the 5′-terminal end of the sense strand, as shown in Tables 5, 7A, and 11 and were added as phosphoramidite compounds during the oligonucleotide synthesis process described above in Example 1. Each of these duplexes incorporated slightly different chemical modifications to sequences targeting position 29150 of the SARS-CoV-2 genome.

[0424] The injections were performed between the skin and muscle (i.e. subcutaneous injections) into the loose skin over the neck and shoulder area. Four (4) mice in each group were tested (n=4). Serum was collected on day 1, day 8, day 15, and day 22, and SEAP expression levels were determined pursuant to the procedure set forth in Example 2, above. Data from the experiment are shown in the following Table 44, with Average SEAP reflecting the normalized average value of SEAP:

TABLE 44
Average SEAP normalized to pre-treatment and saline
control in SARS-CoV-2 -SEAP mice from Example 21.

| | Day 1 | | Day 8 | |
|---|---|---|---|---|
| | Avg | Std Dev | Avg | Std Dev |
| Group ID | SEAP | (+/−) | SEAP | (+/−) |
| Group 1 Saline | 1.000 | 0.000 | 1.000 | 0.123 |
| Group 2 0.5 mg/kg AD11101 | 1.000 | 0.000 | 0.522 | 0.083 |
| Group 3 0.5 mg/kg AD11102 | 1.000 | 0.000 | 0.461 | 0.052 |
| Group 4 0.5 mg/kg AD13485 | 1.000 | 0.000 | 0.647 | 0.151 |
| Group 5 0.5 mg/kg AD13722 | 1.000 | 0.000 | 0.623 | 0.211 |
| Group 6 0.5 mg/kg AD13723 | 1.000 | 0.000 | 0.596 | 0.068 |
| Group 7 0.5 mg/kg AD13724 | 1.000 | 0.000 | 0.420 | 0.084 |
| Group 8 0.5 mg/kg AD14050 | 1.000 | 0.000 | 0.594 | 0.064 |
| Group 9 0.5 mg/kg AD13725 | 1.000 | 0.000 | 0.593 | 0.153 |
| Group 10 0.5 mg/kg AD13727 | 1.000 | 0.000 | 0.570 | 0.126 |
| Group 11 0.5 mg/kg AD13728 | 1.000 | 0.000 | 0.439 | 0.054 |
| Group 12 0.5 mg/kg AD14051 | 1.000 | 0.000 | 0.480 | 0.087 |
| | Day 15 | | Day 22 | |
| | Avg | Std Dev | Avg | Std Dev |
| Group ID | SEAP | (+/−) | SEAP | (+/−) |
| Group 1 Saline | 1.000 | 0.142 | 1.000 | 0.216 |
| Group 2 0.5 mg/kg AD11101 | 0.433 | 0.079 | 0.391 | 0.116 |
| Group 3 0.5 mg/kg AD11102 | 0.392 | 0.024 | 0.327 | 0.042 |
| Group 4 0.5 mg/kg AD13485 | 0.747 | 0.206 | 0.683 | 0.251 |
| Group 5 0.5 mg/kg AD13722 | 0.548 | 0.193 | 0.425 | 0.111 |
| Group 6 0.5 mg/kg AD13723 | 0.522 | 0.151 | 0.485 | 0.110 |
| Group 7 0.5 mg/kg AD13724 | 0.266 | 0.083 | 0.213 | 0.068 |
| Group 8 0.5 mg/kg AD14050 | 0.674 | 0.440 | 0.593 | 0.244 |
| Group 9 0.5 mg/kg AD13725 | 0.515 | 0.157 | 0.597 | 0.200 |
| Group 10 0.5 mg/kg AD13727 | 0.377 | 0.125 | 0.353 | 0.192 |
| Group 11 0.5 mg/kg AD13728 | 0.401 | 0.057 | 0.407 | 0.138 |
| Group 12 0.5 mg/kg AD14051 | 0.383 | 0.118 | 0.451 | 0.120 |

[0425] Each of the CoV RNAi agents in each of the dosing groups (i.e., Groups 2 through 12) showed reduction in SEAP as compared to the saline control (Group 1) across all measured time points, which as described herein, indicates inhibition of SARS-CoV-2 in the SARS-CoV-2-SEAP mouse model. In particular, CoV RNAi agents AD13724 showed particularly potent inhibition at the lower dose level of 0.5 mg/kg, indicating that the particular modifications to the nucleotide sequences provide for improvement over previously identified RNAi agents targeting position 29150 of the SARS-CoV-2 genome. It is anticipated that these RNAi agents for which the sequence modifications provided improvement will translate into improved RNAi agents when tested in other animal models and humans.

### OTHER EMBODIMENTS

[0426] It is to be understood that while the invention has been described in conjunction with the detailed description thereof, the foregoing description is intended to illustrate and not limit the scope of the invention, which is defined by the scope of the appended claims. Other aspects, advantages, and modifications are within the scope of the following claims.

1. An RNAi agent for inhibiting expression of a coronavirus (CoV) genome, comprising:
an antisense strand comprising any one of the modified sequences provided in Table 3B; and
a sense strand comprising a nucleotide sequence that is at least partially complementary to the antisense strand.

2. The RNAi agent of claim 1, wherein the sense strand comprises a nucleotide sequence of at least 17 contiguous nucleotides differing by 0 or 1 nucleotides from any one of the sequences provided in Table 4B, and wherein the sense strand has a region of at least 85% complementarity over the 17 contiguous nucleotides to the antisense strand.

3. The RNAi agent of any one of claims 1-2, wherein all or substantially all of the nucleotides are modified nucleotides.

4. The RNAi agent of any one of claims 1-3, wherein the modified nucleotide is selected from the group consisting of: 2′-O-methyl nucleotide, 2′-fluoro nucleotide, 2′-deoxy nucleotide, 2′,3′-seco nucleotide mimic, locked nucleotide, 2′-F-arabino nucleotide, 2′-methoxyethyl nucleotide, abasic nucleotide, ribitol, inverted nucleotide, inverted 2′-O-methyl nucleotide, inverted 2′-deoxy nucleotide, 2′-amino-modified nucleotide, 2′-alkyl-modified nucleotide, morpholino nucleotide, vinyl phosphonate-containing nucleotide, cyclopropyl phosphonate-containing nucleotide, and 3′O-methyl nucleotide.

5. The RNAi agent of claim 3, wherein all or substantially all of the nucleotides are modified with 2′-O-methyl nucleotides, 2′-fluoro nucleotides, or combinations thereof.

6. An RNAi agent for inhibiting expression of a coronavirus (CoV) genome, comprising:
a sense strand comprising the nucleotide sequence of any one of the modified sequences provided in Table 4B; and
an antisense strand comprising a nucleotide sequence that is at least partially complementary to the sense strand.

7. The RNAi agent of claim 1, wherein the antisense strand comprises the nucleotide sequence of any one of the modified sequences provided in Table 3B and the sense strand comprises the nucleotide sequence of any one of the modified sequences provided in Table 4B.

8. The RNAi agent of any one of claims 1-7, wherein the sense strand is between 18 and 30 nucleotides in length, and the antisense strand is between 18 and 30 nucleotides in length.

9. The RNAi agent of claim 8, wherein the sense strand and the antisense strand are each between 18 and 27 nucleotides in length.

10. The RNAi agent of claim 9, wherein the sense strand and the antisense strand are each between 18 and 24 nucleotides in length.

11. The RNAi agent of claim 10, wherein the sense strand and the antisense strand are each 21 nucleotides in length.

12. The RNAi agent of claim 11, wherein the RNAi agent has two blunt ends.

13. The RNAi agent of any one of claims 1-12, wherein the sense strand comprises one or two terminal caps.

14. The RNAi agent of any one of claims 1-13, wherein the sense strand comprises one or two inverted abasic residues.

15. An RNAi agent for inhibiting expression of a SARS-CoV-2 viral genome, wherein the RNAi agent is comprised of a sense strand and an antisense strand that form a duplex having the structure of any one of the duplexes in Table 7A-2, Table 7B-2, Table 8B, Table 9B, or Table 10B.

16. The RNAi agent of claim 1 or claim 6, comprising an antisense strand that comprises, consists of, or consists essentially of a modified nucleotide sequence that differs by 0 or 1 nucleotides from one of the following nucleotide sequences (5′→3′):

| (SEQ ID NO: 160) | |
|---|---|
| | cPrpusUfsasgUfaGfgUfauAfaCfcAfcagcsa; |
| (SEQ ID NO: 146) | |
| | cPrpusUfsasguaGfguauAfaCfcAfcagcsa; |
| (SEQ ID NO: 163) | |
| | cPrpusUfaguaGfguauAfaCfcAfcagcsa; |
| | or |
| (SEQ ID NO: 140) | |
| | usUfsasguaGfguauAfaCfcAfcagcsa; |

wherein a represents 2′-O-methyl adenosine, c represents 2′-O-methyl cytidine, g represents 2′-O-methyl guanosine, and u represents 2′-O-methyl uridine; Af, represents 2′-fluoro adenosine, Cf represents 2′-fluoro cytidine, Gf represents 2′-fluoro guanosine, and Uf represents 2′-fluoro uridine; cPrpu represents a 5′-cyclopropyl phosphonate-2′-O-methyl uridine; s represents a phosphorothioate linkage; and wherein all or substantially all of the nucleotides on the sense strand are modified nucleotides.

17. The RNAi agent of claim 1, wherein the sense strand comprises, consists of, or consists essentially of a modified nucleotide sequence that differs by 0 or 1 nucleotides from one of the following nucleotide sequences (5′→3′):

| (SEQ ID NO: 290) | |
|---|---|
| | usgcuguggUfuAfuaccuacuaa; |
| | or |
| (SEQ ID NO: 282) | |
| | usgcuguggUfUfAfuaccuacuaa, |

wherein a represents 2′-O-methyl adenosine, c represents 2′-O-methyl cytidine, g represents 2′-O-methyl guanosine, and u represents 2′-O-methyl uridine; Af, represents 2′-fluoro adenosine, Cf represents 2′-fluoro cytidine, Gf represents 2′-fluoro guanosine, and Uf represents 2′-fluoro uridine; s represents a phosphorothioate linkage; and wherein all or substantially all of the nucleotides on the antisense strand are modified nucleotides.

18. The RNAi agent of any one of claims 16-17, wherein the sense strand further includes inverted abasic residues at the 3′ terminal end of the nucleotide sequence, at the 5′ end of the nucleotide sequence, or at both.

19. The RNAi agent of any one of claims 1-18, wherein the RNAi agent is linked to a targeting ligand.

20. The RNAi agent of claim 19, wherein the targeting ligand has affinity for a cell receptor expressed on an epithelial cell.

21. The RNAi agent of claim 20, wherein the targeting ligand comprises an integrin targeting ligand.

22. The RNAi agent of claim 21, wherein the integrin targeting ligand is an αvβ6 integrin targeting ligand.

23. The RNAi agent of claim 22, wherein the targeting ligand comprises the structure: [chemical structure]
or a pharmaceutically acceptable salt thereof, or [chemical structure]
or a pharmaceutically acceptable salt thereof,
wherein [symbol] indicates the point of connection to the RNAi agent.

24. The RNAi agent of any one of claims 19-23, wherein the targeting ligand has a structure selected from the group consisting of: [chemical structure] [chemical structure] [chemical structure] [chemical structure] [chemical structure] [chemical structure] [chemical structure] [chemical structure] [chemical structure]
wherein [symbol] indicates the point of connection to the RNAi agent.

25. The RNAi agent of claim 24, wherein RNAi agent is conjugated to a targeting ligand having the following structure:

[chemical structure]

26. The RNAi agent of any one of claims 19-25, wherein the targeting ligand is conjugated to the sense strand.

27. The RNAi agent of claim 26, wherein the targeting ligand is conjugated to the 5′ terminal end of the sense strand.

28. The RNAi agent of any one of claims 1-27, wherein the RNAi agent is a pharmaceutically acceptable salt.

29. The RNAi agent of any one of claims 1-28, wherein the RNAi agent is a sodium salt.

30. A composition comprising the RNAi agent of any one of claims 1-29, wherein the composition further comprises a pharmaceutically acceptable excipient.

31. The composition of claim 30, further comprising a second RNAi agent capable of inhibiting the expression of a coronavirus (CoV) genome.

32. The composition of any one of claims 30-31, further comprising one or more additional therapeutics.

33. The composition of any one of claims 30-32, wherein the composition is formulated for administration by inhalation.

34. The composition of claim 33, wherein the composition is delivered by a metered-dose inhaler, jet nebulizer, vibrating mesh nebulizer, or soft mist inhaler.

35. The composition of any of claims 30-34, wherein the RNAi agent is a sodium salt.

36. The composition of any of claims 30-35, wherein the pharmaceutically acceptable excipient is water for injection.

37. The composition of any of claims 30-35, wherein the pharmaceutically acceptable excipient is a buffered saline solution.

38. A method for inhibiting a coronavirus (CoV) genome in a cell, the method comprising introducing into a cell an effective amount of an RNAi agent of any one of claims 1-29 or the composition of any one of claims 30-37.

39. The method of claim 38, wherein the cell is within a subject.

40. The method of claim 39, wherein the subject is a human subject.

41. The method of any one of claims 38-40, wherein following the administration of the RNAi agent the CoV genome expression is inhibited by at least about 30%.

42. A method of treating one or more symptoms or diseases associated with coronavirus (CoV) infection, the method comprising administering to a human subject in need thereof a therapeutically effective amount of the composition of any one of claims 30-37.

43. The method of claim 42, wherein the disease is a respiratory disease.

44. The method of claim 43, wherein the respiratory disease is pulmonary inflammation.

45. The method of claim 42, wherein the disease is COVID-19.

46. The method of claim 42, wherein the symptoms are caused by SARS-CoV-2 viral infection.

47. The method of any one of claims 38-46, wherein the RNAi agent is administered at a deposited dose of about 0.01 mg/kg to about 5.0 mg/kg of body weight of the subject.

48. The method of any one of claims 38-47, wherein the RNAi agent is administered at a deposited dose of about 0.03 mg/kg to about 2.0 mg/kg of body weight of the subject.

49. The method of any one of claims 38-48, wherein the RNAi agent is administered in two or more doses.

50. Use of the RNAi agent of any one of claims 1-29, for the treatment of a disease, disorder, or symptom that is caused by coronavirus (CoV) infection, preferably wherein the disease, disorder, or symptom can be mediated at least in part by a reduction in SARS-CoV-2 activity and/or SARS-CoV-2 viral genome expression.

51. Use of the composition according to any one of claims 30-37, for the treatment of a disease, disorder, or symptom that is caused by coronavirus (CoV) infection, preferably wherein the disease, disorder, or symptom can be mediated at least in part by a reduction in SARS-CoV-2 activity and/or SARS-CoV-2 viral genome expression.

52. Use of the composition according to any one of claims 30-37, for the manufacture of a medicament for treatment of a disease, disorder, or symptom that is caused by coronavirus (CoV) infection, preferably wherein the disease, disorder, or symptom can be mediated at least in part by a reduction in SARS-CoV-2 activity and/or SARS-CoV-2 viral genome expression.

53. The use of any one of claims 50-52, wherein the disease is pulmonary inflammation.

54. A method of making an RNAi agent of any one of claims 1-29, comprising annealing a sense strand and an antisense strand to form a double-stranded ribonucleic acid molecule.

55. The method of claim 54, wherein the sense strand comprises a targeting ligand.

56. The method of claim 55, comprising conjugating a targeting ligand to the sense strand.

The application's sequence listing, which the Patent Office published only in electronic form, follows.

SEQUENCE LISTING (605 sequences)

SEQ ID NO: 1 - RNA, 29903 nt, Sars-CoV-2
  source 1..29903: mol_type = genomic RNA
attaaaggtttataccttcccaggtaacaaaccaaccaactttcgatctcttgtagatctgttctctaaacgaactttaaaatctgtgtggctgtcactcggctgcatgcttagtgcactcacgcagtataattaataactaattactgtcgttgacaggacacgagtaactcgtctatcttctgcaggctgcttacggtttcgtccgtgttgcagccgatcatcagcacatctaggtttcgtccgggtgtgaccgaaaggtaagatggagagccttgtccctggtttcaacgagaaaacacacgtccaactcagtttgcctgttttacaggttcgcgacgtgctcgtacgtggctttggagactccgtggaggaggtcttatcagaggcacgtcaacatcttaaagatggcacttgtggcttagtagaagttgaaaaaggcgttttgcctcaacttgaacagccctatgtgttcatcaaacgttcggatgctcgaactgcacctcatggtcatgttatggttgagctggtagcagaactcgaaggcattcagtacggtcgtagtggtgagacacttggtgtccttgtccctcatgtgggcgaaataccagtggcttaccgcaaggttcttcttcgtaagaacggtaataaaggagctggtggccatagttacggcgccgatctaaagtcatttgacttaggcgacgagcttggcactgatccttatgaagattttcaagaaaactggaacactaaacatagcagtggtgttacccgtgaactcatgcgtgagcttaacggaggggcatacactcgctatgtcgataacaacttctgtggccctgatggctaccctcttgagtgcattaaagaccttctagcacgtgctggtaaagcttcatgcactttgtccgaacaactggactttattgacactaagaggggtgtatactgctgccgtgaacatgagcatgaaattgcttggtacacggaacgttctgaaaagagctatgaattgcagacaccttttgaaattaaattggcaaagaaatttgacaccttcaatggggaatgtccaaattttgtatttcccttaaattccataatcaagactattcaaccaagggttgaaaagaaaaagcttgatggctttatgggtagaattcgatctgtctatccagttgcgtcaccaaatgaatgcaaccaaatgtgcctttcaactctcatgaagtgtgatcattgtggtgaaacttcatggcagacgggcgattttgttaaagccacttgcgaattttgtggcactgagaatttgactaaagaaggtgccactacttgtggttacttaccccaaaatgctgttgttaaaatttattgtccagcatgtcacaattcagaagtaggacctgagcatagtcttgccgaataccataatgaatctggcttgaaaaccattcttcgtaagggtggtcgcactattgcctttggaggctgtgtgttctcttatgttggttgccataacaagtgtgcctattgggttccacgtgctagcgctaacataggttgtaaccatacaggtgttgttggagaaggttccgaaggtcttaatgacaaccttcttgaaatactccaaaaagagaaagtcaacatcaatattgttggtgactttaaacttaatgaagagatcgccattattttggcatctttttctgcttccacaagtgcttttgtggaaactgtgaaaggtttggattataaagcattcaaacaaattgttgaatcctgtggtaattttaaagttacaaaaggaaaagctaaaaaaggtgcctggaatattggtgaacagaaatcaatactgagtcctctttatgcatttgcatcagaggctgctcgtgttgtacgatcaattttctcccgcactcttgaaactgctcaaaattctgtgcgtgttttacagaaggccgctataacaatactagatggaatttcacagtattcactgagactcattgatgctatgatgttcacatctgatttggctactaacaatctagttgtaatggcctacattacaggtggtgttgttcagttgacttcgcagtggctaactaacatctttggcactgtttatgaaaaactcaaacccgtccttgattggcttgaagagaagtttaaggaaggtgtagagtttcttagagacggttgggaaattgttaaatttatctcaacctgtgcttgtgaaattgtcggtggacaaattgtcacctgtgcaaaggaaattaaggagagtgttcagacattctttaagcttgtaaataaatttttggctttgtgtgctgactctatcattattggtggagctaaacttaaagccttgaatttaggtgaaacatttgtcacgcactcaaagggattgtacagaaagtgtgttaaatccagagaagaaactggcctactcatgcctctaaaagccccaaaagaaattatcttcttagagggagaaacacttcccacagaagtgttaacagaggaagttgtcttgaaaactggtgatttacaaccattagaacaacctactagtgaagctgttgaagctccattggttggtacaccagtttgtattaacgggcttatgttgctcgaaatcaaagacacagaaaagtactgtgcccttgcacctaatatgatggtaacaaacaataccttcacactcaaaggcggtgcaccaacaaaggttacttttggtgatgacactgtgatagaagtgcaaggttacaagagtgtgaatatcacttttgaacttgatgaaaggattgataaagtacttaatgagaagtgctctgcctatacagttgaactcggtacagaagtaaatgagttcgcctgtgttgtggcagatgctgtcataaaaactttgcaaccagtatctgaattacttacaccactgggcattgatttagatgagtggagtatggctacatactacttatttgatgagtctggtgagtttaaattggcttcacatatgtattgttctttctaccctccagatgaggatgaagaagaaggtgattgtgaagaagaagagtttgagccatcaactcaatatgagtatggtactgaagatgattaccaaggtaaacctttggaatttggtgccacttctgctgctcttcaacctgaagaagagcaagaagaagattggttagatgatgatagtcaacaaactgttggtcaacaagacggcagtgaggacaatcagacaactactattcaaacaattgttgaggttcaacctcaattagagatggaacttacaccagttgttcagactattgaagtgaatagttttagtggttatttaaaacttactgacaatgtatacattaaaaatgcagacattgtggaagaagctaaaaaggtaaaaccaacagtggttgttaatgcagccaatgtttaccttaaacatggaggaggtgttgcaggagccttaaataaggctactaacaatgccatgcaagttgaatctgatgattacatagctactaatggaccacttaaagtgggtggtagttgtgttttaagcggacacaatcttgctaaacactgtcttcatgttgtcggcccaaatgttaacaaaggtgaagacattcaacttcttaagagtgcttatgaaaattttaatcagcacgaagttctacttgcaccattattatcagctggtatttttggtgctgaccctatacattctttaagagtttgtgtagatactgttcgcacaaatgtctacttagctgtctttgataaaaatctctatgacaaacttgtttcaagctttttggaaatgaagagtgaaaagcaagttgaacaaaagatcgctgagattcctaaagaggaagttaagccatttataactgaaagtaaaccttcagttgaacagagaaaacaagatgataagaaaatcaaagcttgtgttgaagaagttacaacaactctggaagaaactaagttcctcacagaaaacttgttactttatattgacattaatggcaatcttcatccagattctgccactcttgttagtgacattgacatcactttcttaaagaaagatgctccatatatagtgggtgatgttgttcaagagggtgttttaactgctgtggttatacctactaaaaaggctggtggcactactgaaatgctagcgaaagctttgagaaaagtgccaacagacaattatataaccacttacccgggtcagggtttaaatggttacactgtagaggaggcaaagacagtgcttaaaaagtgtaaaagtgccttttacattctaccatctattatctctaatgagaagcaagaaattcttggaactgtttcttggaatttgcgagaaatgcttgcacatgcagaagaaacacgcaaattaatgcctgtctgtgtggaaactaaagccatagtttcaactatacagcgtaaatataagggtattaaaatacaagagggtgtggttgattatggtgctagattttacttttacaccagtaaaacaactgtagcgtcacttatcaacacacttaacgatctaaatgaaactcttgttacaatgccacttggctatgtaacacatggcttaaatttggaagaagctgctcggtatatgagatctctcaaagtgccagctacagtttctgtttcttcacctgatgctgttacagcgtataatggttatcttacttcttcttctaaaacacctgaagaacattttattgaaaccatctcacttgctggttcctataaagattggtcctattctggacaatctacacaactaggtatagaatttcttaagagaggtgataaaagtgtatattacactagtaatcctaccacattccacctagatggtgaagttatcacctttgacaatcttaagacacttctttctttgagagaagtgaggactattaaggtgtttacaacagtagacaacattaacctccacacgcaagttgtggacatgtcaatgacatatggacaacagtttggtccaacttatttggatggagctgatgttactaaaataaaacctcataattcacatgaaggtaaaacattttatgttttacctaatgatgacactctacgtgttgaggcttttgagtactaccacacaactgatcctagttttctgggtaggtacatgtcagcattaaatcacactaaaaagtggaaatacccacaagttaatggtttaacttctattaaatgggcagataacaactgttatcttgccactgcattgttaacactccaacaaatagagttgaagtttaatccacctgctctacaagatgcttattacagagcaagggctggtgaagctgctaacttttgtgcacttatcttagcctactgtaataagacagtaggtgagttaggtgatgttagagaaacaatgagttacttgtttcaacatgccaatttagattcttgcaaaagagtcttgaacgtggtgtgtaaaacttgtggacaacagcagacaacccttaagggtgtagaagctgttatgtacatgggcacactttcttatgaacaatttaagaaaggtgttcagataccttgtacgtgtggtaaacaagctacaaaatatctagtacaacaggagtcaccttttgttatgatgtcagcaccacctgctcagtatgaacttaagcatggtacatttacttgtgctagtgagtacactggtaattaccagtgtggtcactataaacatataacttctaaagaaactttgtattgcatagacggtgctttacttacaaagtcctcagaatacaaaggtcctattacggatgttttctacaaagaaaacagttacacaacaaccataaaaccagttacttataaattggatggtgttgtttgtacagaaattgaccctaagttggacaattattataagaaagacaattcttatttcacagagcaaccaattgatcttgtaccaaaccaaccatatccaaacgcaagcttcgataattttaagtttgtatgtgataatatcaaatttgctgatgatttaaaccagttaactggttataagaaacctgcttcaagagagcttaaagttacatttttccctgacttaaatggtgatgtggtggctattgattataaacactacacaccctcttttaagaaaggagctaaattgttacataaacctattgtttggcatgttaacaatgcaactaataaagccacgtataaaccaaatacctggtgtatacgttgtctttggagcacaaaaccagttgaaacatcaaattcgtttgatgtactgaagtcagaggacgcgcagggaatggataatcttgcctgcgaagatctaaaaccagtctctgaagaagtagtggaaaatcctaccatacagaaagacgttcttgagtgtaatgtgaaaactaccgaagttgtaggagacattatacttaaaccagcaaataatagtttaaaaattacagaagaggttggccacacagatctaatggctgcttatgtagacaattctagtcttactattaagaaacctaatgaattatctagagtattaggtttgaaaacccttgctactcatggtttagctgctgttaatagtgtcccttgggatactatagctaattatgctaagccttttcttaacaaagttgttagtacaactactaacatagttacacggtgtttaaaccgtgtttgtactaattatatgccttatttctttactttattgctacaattgtgtacttttactagaagtacaaattctagaattaaagcatctatgccgactactatagcaaagaatactgttaagagtgtcggtaaattttgtctagaggcttcatttaattatttgaagtcacctaatttttctaaactgataaatattataatttggtttttactattaagtgtttgcctaggttctttaatctactcaaccgctgctttaggtgttttaatgtctaatttaggcatgccttcttactgtactggttacagagaaggctatttgaactctactaatgtcactattgcaacctactgtactggttctataccttgtagtgtttgtcttagtggtttagattctttagacacctatccttctttagaaactatacaaattaccatttcatcttttaaatgggatttaactgcttttggcttagttgcagagtggtttttggcatatattcttttcactaggtttttctatgtacttggattggctgcaatcatgcaattgtttttcagctattttgcagtacattttattagtaattcttggcttatgtggttaataattaatcttgtacaaatggccccgatttcagctatggttagaatgtacatcttctttgcatcattttattatgtatggaaaagttatgtgcatgttgtagacggttgtaattcatcaacttgtatgatgtgttacaaacgtaatagagcaacaagagtcgaatgtacaactattgttaatggtgttagaaggtccttttatgtctatgctaatggaggtaaaggcttttgcaaactacacaattggaattgtgttaattgtgatacattctgtgctggtagtacatttattagtgatgaagttgcgagagacttgtcactacagtttaaaagaccaataaatcctactgaccagtcttcttacatcgttgatagtgttacagtgaagaatggttccatccatctttactttgataaagctggtcaaaagacttatgaaagacattctctctctcattttgttaacttagacaacctgagagctaataacactaaaggttcattgcctattaatgttatagtttttgatggtaaatcaaaatgtgaagaatcatctgcaaaatcagcgtctgtttactacagtcagcttatgtgtcaacctatactgttactagatcaggcattagtgtctgatgttggtgatagtgcggaagttgcagttaaaatgtttgatgcttacgttaatacgttttcatcaacttttaacgtaccaatggaaaaactcaaaacactagttgcaactgcagaagctgaacttgcaaagaatgtgtccttagacaatgtcttatctacttttatttcagcagctcggcaagggtttgttgattcagatgtagaaactaaagatgttgttgaatgtcttaaattgtcacatcaatctgacatagaagttactggcgatagttgtaataactatatgctcacctataacaaagttgaaaacatgacaccccgtgaccttggtgcttgtattgactgtagtgcgcgtcatattaatgcgcaggtagcaaaaagtcacaacattgctttgatatggaacgttaaagatttcatgtcattgtctgaacaactacgaaaacaaatacgtagtgctgctaaaaagaataacttaccttttaagttgacatgtgcaactactagacaagttgttaatgttgtaacaacaaagatagcacttaagggtggtaaaattgttaataattggttgaagcagttaattaaagttacacttgtgttcctttttgttgctgctattttctatttaataacacctgttcatgtcatgtctaaacatactgacttttcaagtgaaatcataggatacaaggctattgatggtggtgtcactcgtgacatagcatctacagatacttgttttgctaacaaacatgctgattttgacacatggtttagccagcgtggtggtagttatactaatgacaaagcttgcccattgattgctgcagtcataacaagagaagtgggttttgtcgtgcctggtttgcctggcacgatattacgcacaactaatggtgactttttgcatttcttacctagagtttttagtgcagttggtaacatctgttacacaccatcaaaacttatagagtacactgactttgcaacatcagcttgtgttttggctgctgaatgtacaatttttaaagatgcttctggtaagccagtaccatattgttatgataccaatgtactagaaggttctgttgcttatgaaagtttacgccctgacacacgttatgtgctcatggatggctctattattcaatttcctaacacctaccttgaaggttctgttagagtggtaacaacttttgattctgagtactgtaggcacggcacttgtgaaagatcagaagctggtgtttgtgtatctactagtggtagatgggtacttaacaatgattattacagatctttaccaggagttttctgtggtgtagatgctgtaaatttacttactaatatgtttacaccactaattcaacctattggtgctttggacatatcagcatctatagtagctggtggtattgtagctatcgtagtaacatgccttgcctactattttatgaggtttagaagagcttttggtgaatacagtcatgtagttgcctttaatactttactattccttatgtcattcactgtactctgtttaacaccagtttactcattcttacctggtgtttattctgttatttacttgtacttgacattttatcttactaatgatgtttcttttttagcacatattcagtggatggttatgttcacacctttagtacctttctggataacaattgcttatatcatttgtatttccacaaagcatttctattggttctttagtaattacctaaagagacgtgtagtctttaatggtgtttcctttagtacttttgaagaagctgcgctgtgcacctttttgttaaataaagaaatgtatctaaagttgcgtagtgatgtgctattacctcttacgcaatataatagatacttagctctttataataagtacaagtattttagtggagcaatggatacaactagctacagagaagctgcttgttgtcatctcgcaaaggctctcaatgacttcagtaactcaggttctgatgttctttaccaaccaccacaaacctctatcacctcagctgttttgcagagtggttttagaaaaatggcattcccatctggtaaagttgagggttgtatggtacaagtaacttgtggtacaactacacttaacggtctttggcttgatgacgtagtttactgtccaagacatgtgatctgcacctctgaagacatgcttaaccctaattatgaagatttactcattcgtaagtctaatcataatttcttggtacaggctggtaatgttcaactcagggttattggacattctatgcaaaattgtgtacttaagcttaaggttgatacagccaatcctaagacacctaagtataagtttgttcgcattcaaccaggacagactttttcagtgttagcttgttacaatggttcaccatctggtgtttaccaatgtgctatgaggcccaatttcactattaagggttcattccttaatggttcatgtggtagtgttggttttaacatagattatgactgtgtctctttttgttacatgcaccatatggaattaccaactggagttcatgctggcacagacttagaaggtaacttttatggaccttttgttgacaggcaaacagcacaagcagctggtacggacacaactattacagttaatgttttagcttggttgtacgctgctgttataaatggagacaggtggtttctcaatcgatttaccacaactcttaatgactttaaccttgtggctatgaagtacaattatgaacctctaacacaagaccatgttgacatactaggacctctttctgctcaaactggaattgccgttttagatatgtgtgcttcattaaaagaattactgcaaaatggtatgaatggacgtaccatattgggtagtgctttattagaagatgaatttacaccttttgatgttgttagacaatgctcaggtgttactttccaaagtgcagtgaaaagaacaatcaagggtacacaccactggttgttactcacaattttgacttcacttttagttttagtccagagtactcaatggtctttgttcttttttttgtatgaaaatgcctttttaccttttgctatgggtattattgctatgtctgcttttgcaatgatgtttgtcaaacataagcatgcatttctctgtttgtttttgttaccttctcttgccactgtagcttattttaatatggtctatatgcctgctagttgggtgatgcgtattatgacatggttggatatggttgatactagtttgtctggttttaagctaaaagactgtgttatgtatgcatcagctgtagtgttactaatccttatgacagcaagaactgtgtatgatgatggtgctaggagagtgtggacacttatgaatgtcttgacactcgtttataaagtttattatggtaatgctttagatcaagccatttccatgtgggctcttataatctctgttacttctaactactcaggtgtagttacaactgtcatgtttttggccagaggtattgtttttatgtgtgttgagtattgccctattttcttcataactggtaatacacttcagtgtataatgctagtttattgtttcttaggctatttttgtacttgttactttggcctcttttgtttactcaaccgctactttagactgactcttggtgtttatgattacttagtttctacacaggagtttagatatatgaattcacagggactactcccacccaagaatagcatagatgccttcaaactcaacattaaattgttgggtgttggtggcaaaccttgtatcaaagtagccactgtacagtctaaaatgtcagatgtaaagtgcacatcagtagtcttactctcagttttgcaacaactcagagtagaatcatcatctaaattgtgggctcaatgtgtccagttacacaatgacattctcttagctaaagatactactgaagcctttgaaaaaatggtttcactactttctgttttgctttccatgcagggtgctgtagacataaacaagctttgtgaagaaatgctggacaacagggcaaccttacaagctatagcctcagagtttagttcccttccatcatatgcagcttttgctactgctcaagaagcttatgagcaggctgttgctaatggtgattctgaagttgttcttaaaaagttgaagaagtctttgaatgtggctaaatctgaatttgaccgtgatgcagccatgcaacgtaagttggaaaagatggctgatcaagctatgacccaaatgtataaacaggctagatctgaggacaagagggcaaaagttactagtgctatgcagacaatgcttttcactatgcttagaaagttggataatgatgcactcaacaacattatcaacaatgcaagagatggttgtgttcccttgaacataatacctcttacaacagcagccaaactaatggttgtcataccagactataacacatataaaaatacgtgtgatggtacaacatttacttatgcatcagcattgtgggaaatccaacaggttgtagatgcagatagtaaaattgttcaacttagtgaaattagtatggacaattcacctaatttagcatggcctcttattgtaacagctttaagggccaattctgctgtcaaattacagaataatgagcttagtcctgttgcactacgacagatgtcttgtgctgccggtactacacaaactgcttgcactgatgacaatgcgttagcttactacaacacaacaaagggaggtaggtttgtacttgcactgttatccgatttacaggatttgaaatgggctagattccctaagagtgatggaactggtactatctatacagaactggaaccaccttgtaggtttgttacagacacacctaaaggtcctaaagtgaagtatttatactttattaaaggattaaacaacctaaatagaggtatggtacttggtagtttagctgccacagtacgtctacaagctggtaatgcaacagaagtgcctgccaattcaactgtattatctttctgtgcttttgctgtagatgctgctaaagcttacaaagattatctagctagtgggggacaaccaatcactaattgtgttaagatgttgtgtacacacactggtactggtcaggcaataacagttacaccggaagccaatatggatcaagaatcctttggtggtgcatcgtgttgtctgtactgccgttgccacatagatcatccaaatcctaaaggattttgtgacttaaaaggtaagtatgtacaaatacctacaacttgtgctaatgaccctgtgggttttacacttaaaaacacagtctgtaccgtctgcggtatgtggaaaggttatggctgtagttgtgatcaactccgcgaacccatgcttcagtcagctgatgcacaatcgtttttaaacgggtttgcggtgtaagtgcagcccgtcttacaccgtgcggcacaggcactagtactgatgtcgtatacagggcttttgacatctacaatgataaagtagctggttttgctaaattcctaaaaactaattgttgtcgcttccaagaaaaggacgaagatgacaatttaattgattcttactttgtagttaagagacacactttctctaactaccaacatgaagaaacaatttataatttacttaaggattgtccagctgttgctaaacatgacttctttaagtttagaatagacggtgacatggtaccacatatatcacgtcaacgtcttactaaatacacaatggcagacctcgtctatgctttaaggcattttgatgaaggtaattgtgacacattaaaagaaatacttgtcacatacaattgttgtgatgatgattatttcaataaaaaggactggtatgattttgtagaaaacccagatatattacgcgtatacgccaacttaggtgaacgtgtacgccaagctttgttaaaaacagtacaattctgtgatgccatgcgaaatgctggtattgttggtgtactgacattagataatcaagatctcaatggtaactggtatgatttcggtgatttcatacaaaccacgccaggtagtggagttcctgttgtagattcttattattcattgttaatgcctatattaaccttgaccagggctttaactgcagagtcacatgttgacactgacttaacaaagccttacattaagtgggatttgttaaaatatgacttcacggaagagaggttaaaactctttgaccgttattttaaatattgggatcagacataccacccaaattgtgttaactgtttggatgacagatgcattctgcattgtgcaaactttaatgttttattctctacagtgttcccacctacaagttttggaccactagtgagaaaaatatttgttgatggtgttccatttgtagtttcaactggataccacttcagagagctaggtgttgtacataatcaggatgtaaacttacatagctctagacttagttttaaggaattacttgtgtatgctgctgaccctgctatgcacgctgcttctggtaatctattactagataaacgcactacgtgcttttcagtagctgcacttactaacaatgttgcttttcaaactgtcaaacccggtaattttaacaaagacttctatgactttgctgtgtctaagggtttctttaaggaaggaagttctgttgaattaaaacacttcttctttgctcaggatggtaatgctgctatcagcgattatgactactatcgttataatctaccaacaatgtgtgatatcagacaactactatttgtagttgaagttgttgataagtactttgattgttacgatggtggctgtattaatgctaaccaagtcatcgtcaacaacctagacaaatcagctggttttccatttaataaatggggtaaggctagactttattatgattcaatgagttatgaggatcaagatgcacttttcgcatatacaaaacgtaatgtcatccctactataactcaaatgaatcttaagtatgccattagtgcaaagaatagagctcgcaccgtagctggtgtctctatctgtagtactatgaccaatagacagtttcatcaaaaattattgaaatcaatagccgccactagaggagctactgtagtaattggaacaagcaaattctatggtggttggcacaacatgttaaaaactgtttatagtgatgtagaaaaccctcaccttatgggttgggattatcctaaatgtgatagagccatgcctaacatgcttagaattatggcctcacttgttcttgctcgcaaacatacaacgtgttgtagcttgtcacaccgtttctatagattagctaatgagtgtgctcaagtattgagtgaaatggtcatgtgtggcggttcactatatgttaaaccaggtggaacctcatcaggagatgccacaactgcttatgctaatagtgtttttaacatttgtcaagctgtcacggccaatgttaatgcacttttatctactgatggtaacaaaattgccgataagtatgtccgcaatttacaacacagactttatgagtgtctctatagaaatagagatgttgacacagactttgtgaatgagttttacgcatatttgcgtaaacatttctcaatgatgatactctctgacgatgctgttgtgtgtttcaatagcacttatgcatctcaaggtctagtggctagcataaagaactttaagtcagttctttattatcaaaacaatgtttttatgtctgaagcaaaatgttggactgagactgaccttactaaaggacctcatgaattttgctctcaacatacaatgctagttaaacagggtgatgattatgtgtaccttccttacccagatccatcaagaatcctaggggccggctgttttgtagatgatatcgtaaaaacagatggtacacttatgattgaacggttcgtgtctttagctatagatgcttacccacttactaaacatcctaatcaggagtatgctgatgtctttcatttgtacttacaatacataagaaagctacatgatgagttaacaggacacatgttagacatgtattctgttatgcttactaatgataacacttcaaggtattgggaacctgagttttatgaggctatgtacacaccgcatacagtcttacaggctgttggggcttgtgttctttgcaattcacagacttcattaagatgtggtgcttgcatacgtagaccattcttatgttgtaaatgctgttacgaccatgtcatatcaacatcacataaattagtcttgtctgttaatccgtatgtttgcaatgctccaggttgtgatgtcacagatgtgactcaactttacttaggaggtatgagctattattgtaaatcacataaaccacccattagttttccattgtgtgctaatggacaagtttttggtttatataaaaatacatgtgttggtagcgataatgttactgactttaatgcaattgcaacatgtgactggacaaatgctggtgattacattttagctaacacctgtactgaaagactcaagctttttgcagcagaaacgctcaaagctactgaggagacatttaaactgtcttatggtattgctactgtacgtgaagtgctgtctgacagagaattacatctttcatgggaagttggtaaacctagaccaccacttaaccgaaattatgtctttactggttatcgtgtaactaaaaacagtaaagtacaaataggagagtacacctttgaaaaaggtgactatggtgatgctgttgtttaccgaggtacaacaacttacaaattaaatgttggtgattattttgtgctgacatcacatacagtaatgccattaagtgcacctacactagtgccacaagagcactatgttagaattactggcttatacccaacactcaatatctcagatgagttttctagcaatgttgcaaattatcaaaaggttggtatgcaaaagtattctacactccagggaccacctggtactggtaagagtcattttgctattggcctagctctctactacccttctgctcgcatagtgtatacagcttgctctcatgccgctgttgatgcactatgtgagaaggcattaaaatatttgcctatagataaatgtagtagaattatacctgcacgtgctcgtgtagagtgttttgataaattcaaagtgaattcaacattagaacagtatgtcttttgtactgtaaatgcattgcctgagacgacagcagatatagttgtctttgatgaaatttcaatggccacaaattatgatttgagtgttgtcaatgccagattacgtgctaagcactatgtgtacattggcgaccctgctcaattacctgcaccacgcacattgctaactaagggcacactagaaccagaatatttcaattcagtgtgtagacttatgaaaactataggtccagacatgttcctcggaacttgtcggcgttgtcctgctgaaattgttgacactgtgagtgctttggtttatgataataagcttaaagcacataaagacaaatcagctcaatgctttaaaatgttttataagggtgttatcacgcatgatgtttcatctgcaattaacaggccacaaataggcgtggtaagagaattccttacacgtaaccctgcttggagaaaagctgtctttatttcaccttataattcacagaatgctgtagcctcaaagattttgggactaccaactcaaactgttgattcatcacagggctcagaatatgactatgtcatattcactcaaaccactgaaacagctcactcttgtaatgtaaacagatttaatgttgctattaccagagcaaaagtaggcatactttgcataatgtctgatagagacctttatgacaagttgcaatttacaagtcttgaaattccacgtaggaatgtggcaactttacaagctgaaaatgtaacaggactctttaaagattgtagtaaggtaatcactgggttacatcctacacaggcacctacacacctcagtgttgacactaaattcaaaactgaaggtttatgtgttgacatacctggcatacctaaggacatgacctatagaagactcatctctatgatgggttttaaaatgaattatcaagttaatggttaccctaacatgtttatcacccgcgaagaagctataagacatgtacgtgcatggattggcttcgatgtcgaggggtgtcatgctactagagaagctgttggtaccaatttacctttacagctaggtttttctacaggtgttaacctagttgctgtacctacaggttatgttgatacacctaataatacagatttttccagagttagtgctaaaccaccgcctggagatcaatttaaacacctcataccacttatgtacaaaggacttccttggaatgtagtgcgtataaagattgtacaaatgttaagtgacacacttaaaaatctctctgacagagtcgtatttgtcttatgggcacatggctttgagttgacatctatgaagtattttgtgaaaataggacctgagcgcacctgttgtctatgtgatagacgtgccacatgcttttccactgcttcagacacttatgcctgttggcatcattctattggatttgattacgtctataatccgtttatgattgatgttcaacaatggggttttacaggtaacctacaaagcaaccatgatctgtattgtcaagtccatggtaatgcacatgtagctagttgtgatgcaatcatgactaggtgtctagctgtccacgagtgctttgttaagcgtgttgactggactattgaatatcctataattggtgatgaactgaagattaatgcggcttgtagaaaggttcaacacatggttgttaaagctgcattattagcagacaaattcccagttcttcacgacattggtaaccctaaagctattaagtgtgtacctcaagctgatgtagaatggaagttctatgatgcacagccttgtagtgacaaagcttataaaatagaagaattattctattcttatgccacacattctgacaaattcacagatggtgtatgcctattttggaattgcaatgtcgatagatatcctgctaattccattgtttgtagatttgacactagagtgctatctaaccttaacttgcctggttgtgatggtggcagtttgtatgtaaataaacatgcattccacacaccagcttttgataaaagtgcttttgttaatttaaaacaattaccatttttctattactctgacagtccatgtgagtctcatggaaaacaagtagtgtcagatatagattatgtaccactaaagtctgctacgtgtataacacgttgcaatttaggtggtgctgtctgtagacatcatgctaatgagtacagattgtatctcgatgcttataacatgatgatctcagctggctttagcttgtgggtttacaaacaatttgatacttataacctctggaacacttttacaagacttcagagtttagaaaatgtggcttttaatgttgtaaataagggacactttgatggacaacagggtgaagtaccagtttctatcattaataacactgtttacacaaaagttgatggtgttgatgtagaattgtttgaaaataaaacaacattacctgttaatgtagcatttgagctttgggctaagcgcaacattaaaccagtaccagaggtgaaaatactcaataatttgggtgtggacattgctgctaatactgtgatctgggactacaaaagagatgctccagcacatatatctactattggtgtttgttctatgactgacatagccaagaaaccaactgaaacgatttgtgcaccactcactgtcttttttgatggtagagttgatggtcaagtagacttatttagaaatgcccgtaatggtgttcttattacagaaggtagtgttaaaggtttacaaccatctgtaggtcccaaacaagctagtcttaatggagtcacattaattggagaagccgtaaaaacacagttcaattattataagaaagttgatggtgttgtccaacaattacctgaaacttactttactcagagtagaaatttacaagaatttaaacccaggagtcaaatggaaattgatttcttagaattagctatggatgaattcattgaacggtataaattagaaggctatgccttcgaacatatcgtttatggagattttagtcatagtcagttaggtggtttacatctactgattggactagctaaacgttttaaggaatcaccttttgaattagaagattttattcctatggacagtacagttaaaaactatttcataacagatgcgcaaacaggttcatctaagtgtgtgtgttctgttattgatttattacttgatgattttgttgaaataataaaatcccaagatttatctgtagtttctaaggttgtcaaagtgactattgactatacagaaatttcatttatgctttggtgtaaagatggccatgtagaaacattttacccaaaattacaatctagtcaagcgtggcaaccgggtgttgctatgcctaatctttacaaaatgcaaagaatgctattagaaaagtgtgaccttcaaaattatggtgatagtgcaacattacctaaaggcataatgatgaatgtcgcaaaatatactcaactgtgtcaatatttaaacacattaacattagctgtaccctataatatgagagttatacattttggtgctggttctgataaaggagttgcaccaggtacagctgttttaagacagtggttgcctacgggtacgctgcttgtcgattcagatcttaatgactttgtctctgatgcagattcaactttgattggtgattgtgcaactgtacatacagctaataaatgggatctcattattagtgatatgtacgaccctaagactaaaaatgttacaaaagaaaatgactctaaagagggttttttcacttacatttgtgggtttatacaacaaaagctagctcttggaggttccgtggctataaagataacagaacattcttggaatgctgatctttataagctcatgggacacttcgcatggtggacagcctttgttactaatgtgaatgcgtcatcatctgaagcatttttaattggatgtaattatcttggcaaaccacgcgaacaaatagatggttatgtcatgcatgcaaattacatattttggaggaatacaaatccaattcagttgtcttcctattctttatttgacatgagtaaatttccccttaaattaaggggtactgctgttatgtctttaaaagaaggtcaaatcaatgatatgattttatctcttcttagtaaaggtagacttataattagagaaaacaacagagttgttatttctagtgatgttcttgttaacaactaaacgaacaatgtttgtttttcttgttttattgccactagtctctagtcagtgtgttaatcttacaaccagaactcaattaccccctgcatacactaattctttcacacgtggtgtttattaccctgacaaagttttcagatcctcagttttacattcaactcaggacttgttcttacctttcttttccaatgttacttggttccatgctatacatgtctctgggaccaatggtactaagaggtttgataaccctgtcctaccatttaatgatggtgtttattttgcttccactgagaagtctaacataataagaggctggatttttggtactactttagattcgaagacccagtccctacttattgttaataacgctactaatgttgttattaaagtctgtgaatttcaattttgtaatgatccatttttgggtgtttattaccacaaaaacaacaaaagttggatggaaagtgagttcagagtttattctagtgcgaataattgcacttttgaatatgtctctcagccttttcttatggaccttgaaggaaaacagggtaatttcaaaaatcttagggaatttgtgtttaagaatattgatggttattttaaaatatattctaagcacacgcctattaatttagtgcgtgatctccctcagggtttttcggctttagaaccattggtagatttgccaataggtattaacatcactaggtttcaaactttacttgctttacatagaagttatttgactcctggtgattcttcttcaggttggacagctggtgctgcagcttattatgtgggttatcttcaacctaggacttttctattaaaatataatgaaaatggaaccattacagatgctgtagactgtgcacttgaccctctctcagaaacaaagtgtacgttgaaatccttcactgtagaaaaaggaatctatcaaacttctaactttagagtccaaccaacagaatctattgttagatttcctaatattacaaacttgtgcccttttggtgaagtttttaacgccaccagatttgcatctgtttatgcttggaacaggaagagaatcagcaactgtgttgctgattattctgtcctatataattccgcatcattttccacttttaagtgttatggagtgtctcctactaaattaaatgatctctgctttactaatgtctatgcagattcatttgtaattagaggtgatgaagtcagacaaatcgctccagggcaaactggaaagattgctgattataattataaattaccagatgattttacaggctgcgttatagcttggaattctaacaatcttgattctaaggttggtggtaattataattacctgtatagattgtttaggaagtctaatctcaaaccttttgagagagatatttcaactgaaatctatcaggccggtagcacaccttgtaatggtgttgaaggttttaattgttactttcctttacaatcatatggtttccaacccactaatggtgttggttaccaaccatacagagtagtagtactttcttttgaacttctacatgcaccagcaactgtttgtggacctaaaaagtctactaatttggttaaaaacaaatgtgtcaatttcaacttcaatggtttaacaggcacaggtgttcttactgagtctaacaaaaagtttctgcctttccaacaatttggcagagacattgctgacactactgatgctgtccgtgatccacagacacttgagattcttgacattacaccatgttcttttggtggtgtcagtgttataacaccaggaacaaatacttctaaccaggttgctgttctttatcaggatgttaactgcacagaagtccctgttgctattcatgcagatcaacttactcctacttggcgtgtttattctacaggttctaatgtttttcaaacacgtgcaggctgtttaataggggctgaacatgtcaacaactcatatgagtgtgacatacccattggtgcaggtatatgcgctagttatcagactcagactaattctcctcggcgggcacgtagtgtagctagtcaatccatcattgcctacactatgtcacttggtgcagaaaattcagttgcttactctaataactctattgccatacccacaaattttactattagtgttaccacagaaattctaccagtgtctatgaccaagacatcagtagattgtacaatgtacatttgtggtgattcaactgaatgcagcaatcttttgttgcaatatggcagtttttgtacacaattaaaccgtgctttaactggaatagctgttgaacaagacaaaaacacccaagaagtttttgcacaagtcaaacaaatttacaaaacaccaccaattaaagattttggtggttttaatttttcacaaatattaccagatccatcaaaaccaagcaagaggtcatttattgaagatctacttttcaacaaagtgacacttgcagatgctggcttcatcaaacaatatggtgattgccttggtgatattgctgctagagacctcatttgtgcacaaaagtttaacggccttactgttttgccacctttgctcacagatgaaatgattgctcaatacacttctgcactgttagcgggtacaatcacttctggttggacctttggtgcaggtgctgcattacaaataccatttgctatgcaaatggcttataggtttaatggtattggagttacacagaatgttctctatgagaaccaaaaattgattgccaaccaatttaatagtgctattggcaaaattcaagactcactttcttccacagcaagtgcacttggaaaacttcaagatgtggtcaaccaaaatgcacaagctttaaacacgcttgttaaacaacttagctccaattttggtgcaatttcaagtgttttaaatgatatcctttcacgtcttgacaaagttgaggctgaagtgcaaattgataggttgatcacaggcagacttcaaagtttgcagacatatgtgactcaacaattaattagagctgcagaaatcagagcttctgctaatcttgctgctactaaaatgtcagagtgtgtacttggacaatcaaaaagagttgatttttgtggaaagggctatcatcttatgtccttccctcagtcagcacctcatggtgtagtcttcttgcatgtgacttatgtccctgcacaagaaaagaacttcacaactgctcctgccatttgtcatgatggaaaagcacactttcctcgtgaaggtgtctttgtttcaaatggcacacactggtttgtaacacaaaggaatttttatgaaccacaaatcattactacagacaacacatttgtgtctggtaactgtgatgttgtaataggaattgtcaacaacacagtttatgatcctttgcaacctgaattagactcattcaaggaggagttagataaatattttaagaatcatacatcaccagatgttgatttaggtgacatctctggcattaatgcttcagttgtaaacattcaaaaagaaattgaccgcctcaatgaggttgccaagaatttaaatgaatctctcatcgatctccaagaacttggaaagtatgagcagtatataaaatggccatggtacatttggctaggttttatagctggcttgattgccatagtaatggtgacaattatgctttgctgtatgaccagttgctgtagttgtctcaagggctgttgttcttgtggatcctgctgcaaatttgatgaagacgactctgagccagtgctcaaaggagtcaaattacattacacataaacgaacttatggatttgtttatgagaatcttcacaattggaactgtaactttgaagcaaggtgaaatcaaggatgctactccttcagattttgttcgcgctactgcaacgataccgatacaagcctcactccctttcggatggcttattgttggcgttgcacttcttgctgtttttcagagcgcttccaaaatcataaccctcaaaaagagatggcaactagcactctccaagggtgttcactttgtttgcaacttgctgttgttgtttgtaacagtttactcacaccttttgctcgttgctgctggccttgaagccccttttctctatctttatgctttagtctacttcttgcagagtataaactttgtaagaataataatgaggctttggctttgctggaaatgccgttccaaaaacccattactttatgatgccaactattttctttgctggcatactaattgttacgactattgtataccttacaatagtgtaacttcttcaattgtcattacttcaggtgatggcacaacaagtcctatttctgaacatgactaccagattggtggttatactgaaaaatgggaatctggagtaaaagactgtgttgtattacacagttacttcacttcagactattaccagctgtactcaactcaattgagtacagacactggtgttgaacatgttaccttcttcatctacaataaaattgttgatgagcctgaagaacatgtccaaattcacacaatcgacggttcatccggagttgttaatccagtaatggaaccaatttatgatgaaccgacgacgactactagcgtgcctttgtaagcacaagctgatgagtacgaacttatgtactcattcgtttcggaagagacaggtacgttaatagttaatagcgtacttctttttcttgctttcgtggtattcttgctagttacactagccatccttactgcgcttcgattgtgtgcgtactgctgcaatattgttaacgtgagtcttgtaaaaccttctttttacgtttactctcgtgttaaaaatctgaattcttctagagttcctgatcttctggtctaaacgaactaaatattatattagtttttctgtttggaactttaattttagccatggcagattccaacggtactattaccgttgaagagcttaaaaagctccttgaacaatggaacctagtaataggtttcctattccttacatggatttgtcttctacaatttgcctatgccaacaggaataggtttttgtatataattaagttaattttcctctggctgttatggccagtaactttagcttgttttgtgcttgctgctgtttacagaataaattggatcaccggtggaattgctatcgcaatggcttgtcttgtaggcttgatgtggctcagctacttcattgcttctttcagactgtttgcgcgtacgcgttccatgtggtcattcaatccagaaactaacattcttctcaacgtgccactccatggcactattctgaccagaccgcttctagaaagtgaactcgtaatcggagctgtgatccttcgtggacatcttcgtattgctggacaccatctaggacgctgtgacatcaaggacctgcctaaagaaatcactgttgctacatcacgaacgctttcttattacaaattgggagcttcgcagcgtgtagcaggtgactcaggttttgctgcatacagtcgctacaggattggcaactataaattaaacacagaccattccagtagcagtgacaatattgctttgcttgtacagtaagtgacaacagatgtttcatctcgttgactttcaggttactatagcagagatattactaattattatgaggacttttaaagtttccatttggaatcttgattacatcataaacctcataattaaaaatttatctaagtcactaactgagaataaatattctcaattagatgaagagcaaccaatggagattgattaaacgaacatgaaaattattcttttcttggcactgataacactcgctacttgtgagctttatcactaccaagagtgtgttagaggtacaacagtacttttaaaagaaccttgctcttctggaacatacgagggcaattcaccatttcatcctctagctgataacaaatttgcactgacttgctttagcactcaatttgcttttgcttgtcctgacggcgtaaaacacgtctatcagttacgtgccagatcagtttcacctaaactgttcatcagacaagaggaagttcaagaactttactctccaatttttcttattgttgcggcaatagtgtttataacactttgcttcacactcaaaagaaagacagaatgattgaactttcattaattgacttctatttgtgctttttagcctttctgctattccttgttttaattatgcttattatcttttggttctcacttgaactgcaagatcataatgaaacttgtcacgcctaaacgaacatgaaatttcttgttttcttaggaatcatcacaactgtagctgcatttcaccaagaatgtagtttacagtcatgtactcaacatcaaccatatgtagttgatgacccgtgtcctattcacttctattctaaatggtatattagagtaggagctagaaaatcagcacctttaattgaattgtgcgtggatgaggctggttctaaatcacccattcagtacatcgatatcggtaattatacagtttcctgtttaccttttacaattaattgccaggaacctaaattgggtagtcttgtagtgcgttgttcgttctatgaagactttttagagtatcatgacgttcgtgttgttttagatttcatctaaacgaacaaactaaaatgtctgataatggaccccaaaatcagcgaaatgcaccccgcattacgtttggtggaccctcagattcaactggcagtaaccagaatggagaacgcagtggggcgcgatcaaaacaacgtcggccccaaggtttacccaataatactgcgtcttggttcaccgctctcactcaacatggcaaggaagaccttaaattccctcgaggacaaggcgttccaattaacaccaatagcagtccagatgaccaaattggctactaccgaagagctaccagacgaattcgtggtggtgacggtaaaatgaaagatctcagtccaagatggtatttctactacctaggaactgggccagaagctggacttccctatggtgctaacaaagacggcatcatatgggttgcaactgagggagccttgaatacaccaaaagatcacattggcacccgcaatcctgctaacaatgctgcaatcgtgctacaacttcctcaaggaacaacattgccaaaaggcttctacgcagaagggagcagaggcggcagtcaagcctcttctcgttcctcatcacgtagtcgcaacagttcaagaaattcaactccaggcagcagtaggggaacttctcctgctagaatggctggcaatggcggtgatgctgctcttgctttgctgctgcttgacagattgaaccagcttgagagcaaaatgtctggtaaaggccaacaacaacaaggccaaactgtcactaagaaatctgctgctgaggcttctaagaagcctcggcaaaaacgtactgccactaaagcatacaatgtaacacaagctttcggcagacgtggtccagaacaaacccaaggaaattttggggaccaggaactaatcagacaaggaactgattacaaacattggccgcaaattgcacaatttgcccccagcgcttcagcgttcttcggaatgtcgcgcattggcatggaagtcacaccttcgggaacgtggttgacctacacaggtgccatcaaattggatgacaaagatccaaatttcaaagatcaagtcattttgctgaataagcatattgacgcatacaaaacattcccaccaacagagcctaaaaaggacaaaaagaagaaggctgatgaaactcaagccttaccgcagagacagaagaaacagcaaactgtgactcttcttcctgctgcagatttggatgatttctccaaacaattgcaacaatccatgagcagtgctgactcaactcaggcctaaactcatgcagaccacacaaggcagatgggctatataaacgttttcgcttttccgtttacgatatatagtctactcttgtgcagaatgaattctcgtaactacatagcacaagtagatgtagttaactttaatctcacatagcaatctttaatcagtgtgtaacattagggaggacttgaaagagccaccacattttcaccgaggccacgcggagtacgatcgagtgtacagtgaacaatgctagggagagctgcctatatggaagagccctaatgtgtaaaattaattttagtagtgctatccccatgtgattttaatagcttcttaggagaatgacaaaaaaaaaaaaaaaaaaaaaaaaaaaaaaaaa

SEQ ID NO: 2 - RNA, 19 nt, synthetic construct
  source 1..19: mol_type = other RNA
ctgtggttatacctactaa

SEQ ID NO: 3 - RNA, 19 nt, synthetic construct
  source 1..19: mol_type = other RNA
acaaggaactgattacaaa

SEQ ID NO: 4 - RNA, 19 nt, synthetic construct
  source 1..19: mol_type = other RNA
ttagtaggtataaccacag

SEQ ID NO: 5 - RNA, 19 nt, synthetic construct
  source 1..19: mol_type = other RNA
atagtaggtataaccacag

SEQ ID NO: 6 - RNA, 19 nt, synthetic construct
  source 1..19: mol_type = other RNA
ntagtaggtataaccacag

SEQ ID NO: 7 - RNA, 19 nt, synthetic construct
  source 1..19: mol_type = other RNA
ntagtaggtataaccacan

SEQ ID NO: 8 - RNA, 19 nt, synthetic construct
  source 1..19: mol_type = other RNA
tttgtaatcagttccttgt

SEQ ID NO: 9 - RNA, 19 nt, synthetic construct
  source 1..19: mol_type = other RNA
attgtaatcagttccttgt

SEQ ID NO: 10 - RNA, 19 nt, synthetic construct
  source 1..19: mol_type = other RNA
nttgtaatcagttccttgt

SEQ ID NO: 11 - RNA, 19 nt, synthetic construct
  source 1..19: mol_type = other RNA
nttgtaatcagttccttgn

SEQ ID NO: 12 - RNA, 19 nt, synthetic construct
  source 1..19: mol_type = other RNA
ctgtggttatacctactaa

SEQ ID NO: 13 - RNA, 19 nt, synthetic construct
  source 1..19: mol_type = other RNA
ctgtggttatacctactat

SEQ ID NO: 14 - RNA, 19 nt, synthetic construct
  source 1..19: mol_type = other RNA
ctgtggttatacctactan

SEQ ID NO: 15 - RNA, 19 nt, synthetic construct
  source 1..19: mol_type = other RNA
ntgtggttatacctactan

SEQ ID NO: 16 - RNA, 19 nt, synthetic construct
  source 1..19: mol_type = other RNA
acaaggaactgattacaaa

SEQ ID NO: 17 - RNA, 19 nt, synthetic construct
  source 1..19: mol_type = other RNA
acaaggaactgattacaat

SEQ ID NO: 18 - RNA, 19 nt, synthetic construct
  source 1..19: mol_type = other RNA
acaaggaactgattacaan

SEQ ID NO: 19 - RNA, 19 nt, synthetic construct
  source 1..19: mol_type = other RNA
ncaaggaactgattacaan

SEQ ID NO: 20 - RNA, 21 nt, synthetic construct
  modified_base 1: mod_base = OTHER; note = 2'-O-methyladenosine
  modified_base 1^2: mod_base = OTHER; note = phosphorothioate linkage
  modified_base 2: mod_base = OTHER; note = 2'-fluoroadenosine
  modified_base 2^3: mod_base = OTHER; note = phosphorothioate linkage
  modified_base 3: mod_base = OTHER; note = 2'-O-methyladenosine
  modified_base 3^4: mod_base = OTHER; note = phosphorothioate linkage
  modified_base 4: mod_base = OTHER; note = 2'-fluorocytidine
  modified_base 5: mod_base = um
  modified_base 6: mod_base = OTHER; note = 2'-fluoroguanosine
  modified_base 7: mod_base = OTHER; note = 2'-O-methyladenosine
  modified_base 8: mod_base = OTHER; note = 2'-fluoroguanosine
  modified_base 9: mod_base = um
  modified_base 10: mod_base = OTHER; note = 2'-fluorouridine
  modified_base 11: mod_base = gm
  modified_base 12: mod_base = OTHER; note = 2'-fluoroguanosine
  modified_base 13: mod_base = OTHER; note = 2'-O-methyladenosine
  modified_base 14: mod_base = OTHER; note = 2'-fluorocytidine
  modified_base 15: mod_base = gm
  modified_base 16: mod_base = OTHER; note = 2'-fluorouridine
  modified_base 17: mod_base = gm
  modified_base 18: mod_base = OTHER; note = 2'-fluorouridine
  modified_base 19: mod_base = gm
  modified_base 20: mod_base = OTHER; note = 2'-fluorouridine
  modified_base 20^21: mod_base = OTHER; note = phosphorothioate linkage
  modified_base 21: mod_base = cm
  source 1..21: mol_type = other RNA
aaactgagttggacgtgtgtc

SEQ ID NO: 21 - RNA, 21 nt, synthetic construct
  modified_base 1: mod_base = um
  modified_base 1^2: mod_base = OTHER; note = phosphorothioate linkage
  modified_base 2: mod_base = OTHER; note = 2'-fluoroguanosine
  modified_base 2^3: mod_base = OTHER; note = phosphorothioate linkage
  modified_base 3: mod_base = OTHER; note = 2'-O-methyladenosine
  modified_base 3^4: mod_base = OTHER; note = phosphorothioate linkage
  modified_base 4: mod_base = OTHER; note = 2'-fluorouridine
  modified_base 5: mod_base = um
  modified_base 6: mod_base = OTHER; note = 2'-fluorouridine
  modified_base 7: mod_base = um
  modified_base 8: mod_base = OTHER; note = 2'-fluorocytidine
  modified_base 9: mod_base = cm
  modified_base 10: mod_base = OTHER; note = 2'-fluoroadenosine
  modified_base 11: mod_base = cm
  modified_base 12: mod_base = OTHER; note = 2'-fluorouridine
  modified_base 13: mod_base = OTHER; note = 2'-O-methyladenosine
  modified_base 14: mod_base = OTHER; note = 2'-fluorocytidine
  modified_base 15: mod_base = um
  modified_base 16: mod_base = OTHER; note = 2'-fluorouridine
  modified_base 17: mod_base = cm
  modified_base 18: mod_base = OTHER; note = 2'-fluorouridine
  modified_base 19: mod_base = um
  modified_base 20: mod_base = OTHER; note = 2'-fluorocytidine
  modified_base 20^21: mod_base = OTHER; note = phosphorothioate linkage
  modified_base 21: mod_base = cm
  source 1..21: mol_type = other RNA
tgattttccactacttcttcc

SEQ ID NO: 22 - RNA, 21 nt, synthetic construct
  modified_base 1: mod_base = um
  modified_base 1^2: mod_base = OTHER; note = phosphorothioate linkage
  modified_base 2: mod_base = OTHER; note = 2'-fluorouridine
  modified_base 2^3: mod_base = OTHER; note = phosphorothioate linkage
  modified_base 3: mod_base = OTHER; note = 2'-O-methyladenosine
  modified_base 3^4: mod_base = OTHER; note = phosphorothioate linkage
  modified_base 4: mod_base = OTHER; note = 2'-fluoroguanosine
  modified_base 5: mod_base = gm
  modified_base 6: mod_base = OTHER; note = 2'-fluoroadenosine
  modified_base 7: mod_base = um
  modified_base 8: mod_base = OTHER; note = 2'-fluorouridine
  modified_base 9: mod_base = um
  modified_base 10: mod_base = OTHER; note = 2'-fluorouridine
  modified_base 11: mod_base = cm
  modified_base 12: mod_base = OTHER; note = 2'-fluorocytidine
  modified_base 13: mod_base = OTHER; note = 2'-O-methyladenosine
  modified_base 14: mod_base = OTHER; note = 2'-fluorocytidine
  modified_base 15: mod_base = um
  modified_base 16: mod_base = OTHER; note = 2'-fluoroadenosine
  modified_base 17: mod_base = cm
  modified_base 18: mod_base = OTHER; note = 2'-fluorouridine
  modified_base 19: mod_base = um
  modified_base 20: mod_base = OTHER; note = 2'-fluorocytidine
  modified_base 20^21: mod_base = OTHER; note = phosphorothioate linkage
  modified_base 21: mod_base = cm
  source 1..21: mol_type = other RNA
ttaggattttccactacttcc

SEQ ID NO: 23 - RNA, 21 nt, synthetic construct
  modified_base 1: mod_base = OTHER; note = 2'-O-methyladenosine
  modified_base 1^2: mod_base = OTHER; note = phosphorothioate linkage
  modified_base 2: mod_base = OTHER; note = 2'-fluoroadenosine
  modified_base 2^3: mod_base = OTHER; note = phosphorothioate linkage
  modified_base 3: mod_base = OTHER; note = 2'-O-methyladenosine
  modified_base 3^4: mod_base = OTHER; note = phosphorothioate linkage
  modified_base 4: mod_base = OTHER; note = 2'-fluorocytidine
  modified_base 5: mod_base = cm
  modified_base 6: mod_base = OTHER; note = 2'-fluoroadenosine
  modified_base 7: mod_base = OTHER; note = 2'-O-methyladenosine
  modified_base 8: mod_base = OTHER; note = 2'-fluorocytidine
  modified_base 9: mod_base = OTHER; note = 2'-O-methyladenosine
  modified_base 10: mod_base = OTHER; note = 2'-fluorocytidine
  modified_base 11: mod_base = um
  modified_base 12: mod_base = OTHER; note = 2'-fluoroadenosine
  modified_base 13: mod_base = cm
  modified_base 14: mod_base = OTHER; note = 2'-fluorocytidine
  modified_base 15: mod_base = OTHER; note = 2'-O-methyladenosine
  modified_base 16: mod_base = OTHER; note = 2'-fluorocytidine
  modified_base 17: mod_base = OTHER; note = 2'-O-methyladenosine
  modified_base 18: mod_base = OTHER; note = 2'-fluorouridine
  modified_base 19: mod_base = gm
  modified_base 20: mod_base = OTHER; note = 2'-fluoroadenosine
  modified_base 20^21: mod_base = OTHER; note = phosphorothioate linkage
  modified_base 21: mod_base = cm
  source 1..21: mol_type = other RNA
aaaccaacactaccacatgac

SEQ ID NO: 24 - RNA, 21 nt, synthetic construct
  modified_base 1: mod_base = OTHER; note = 2'-O-methyladenosine
  modified_base 1^2: mod_base = OTHER; note = phosphorothioate linkage
  modified_base 2: mod_base = OTHER; note = 2'-fluorouridine
  modified_base 2^3: mod_base = OTHER; note = phosphorothioate linkage
  modified_base 3: mod_base = OTHER; note = 2'-O-methyladenosine
  modified_base 3^4: mod_base = OTHER; note = phosphorothioate linkage
  modified_base 4: mod_base = OTHER; note = 2'-fluorocytidine
  modified_base 5: mod_base = OTHER; note = 2'-O-methyladenosine
  modified_base 6: mod_base = OTHER; note = 2'-fluorouridine
  modified_base 7: mod_base = um
  modified_base 8: mod_base = OTHER; note = 2'-fluorouridine
  modified_base 9: mod_base = gm
  modified_base 10: mod_base = OTHER; note = 2'-fluoroguanosine
  modified_base 11: mod_base = gm
  modified_base 12: mod_base = OTHER; note = 2'-fluorouridine
  modified_base 13: mod_base = cm
  modified_base 14: mod_base = OTHER; note = 2'-fluoroadenosine
  modified_base 15: mod_base = um
  modified_base 16: mod_base = OTHER; note = 2'-fluoroadenosine
  modified_base 17: mod_base = gm
  modified_base 18: mod_base = OTHER; note = 2'-fluorocytidine
  modified_base 19: mod_base = um
  modified_base 20: mod_base = OTHER; note = 2'-fluorouridine
  modified_base 20^21: mod_base = OTHER; note = phosphorothioate linkage
  modified_base 21: mod_base = gm
  source 1..21: mol_type = other RNA
atacatttgggtcatagcttg

SEQ ID NO: 25 - RNA, 21 nt, synthetic construct
  modified_base 1: mod_base = um
  modified_base 1^2: mod_base = OTHER; note = phosphorothioate linkage
  modified_base 2: mod_base = OTHER; note = 2'-fluoroguanosine
  modified_base 2^3: mod_base = OTHER; note = phosphorothioate linkage
  modified_base 3: mod_base = OTHER; note = 2'-O-methyladenosine
  modified_base 3^4: mod_base = OTHER; note = phosphorothioate linkage
  modified_base 4: mod_base = OTHER; note = 2'-fluorouridine
  modified_base 5: mod_base = OTHER; note = 2'-O-methyladenosine
  modified_base 6: mod_base = OTHER; note = 2'-fluorouridine
  modified_base 7: mod_base = OTHER; note = 2'-O-methyladenosine
  modified_base 8: mod_base = OTHER; note = 2'-fluorouridine
  modified_base 9: mod_base = gm
  modified_base 10: mod_base = OTHER; note = 2'-fluorouridine
  modified_base 11: mod_base = gm
  modified_base 12: mod_base = OTHER; note = 2'-fluoroguanosine
  modified_base 13: mod_base = um
  modified_base 14: mod_base = OTHER; note = 2'-fluoroadenosine
  modified_base 15: mod_base = cm
  modified_base 16: mod_base = OTHER; note = 2'-fluorocytidine
  modified_base 17: mod_base = OTHER; note = 2'-O-methyladenosine
  modified_base 18: mod_base = OTHER; note = 2'-fluorouridine
  modified_base 19: mod_base = gm
  modified_base 20: mod_base = OTHER; note = 2'-fluorouridine
  modified_base 20^21: mod_base = OTHER; note = phosphorothioate linkage
  modified_base 21: mod_base = cm
  source 1..21: mol_type = other RNA
tgatatatgtggtaccatgtc

SEQ ID NO: 26 - RNA, 21 nt, synthetic construct
  modified_base 1: mod_base = um
  modified_base 1^2: mod_base = OTHER; note = phosphorothioate linkage
  modified_base 2: mod_base = OTHER; note = 2'-fluorouridine
  modified_base 2^3: mod_base = OTHER; note = phosphorothioate linkage
  modified_base 3: mod_base = gm
  modified_base 3^4: mod_base = OTHER; note = phosphorothioate linkage
  modified_base 4: mod_base = OTHER; note = 2'-fluoroadenosine
  modified_base 5: mod_base = um
  modified_base 6: mod_base = OTHER; note = 2'-fluoroadenosine
  modified_base 7: mod_base = um
  modified_base 8: mod_base = OTHER; note = 2'-fluoroadenosine
  modified_base 9: mod_base = um
  modified_base 10: mod_base = OTHER; note = 2'-fluoroguanosine
  modified_base 11: mod_base = um
  modified_base 12: mod_base = OTHER; note = 2'-fluoroguanosine
  modified_base 13: mod_base = gm
  modified_base 14: mod_base = OTHER; note = 2'-fluorouridine
  modified_base 15: mod_base = OTHER; note = 2'-O-methyladenosine
  modified_base 16: mod_base = OTHER; note = 2'-fluorocytidine
  modified_base 17: mod_base = cm
  modified_base 18: mod_base = OTHER; note = 2'-fluoroadenosine
  modified_base 19: mod_base = um
  modified_base 20: mod_base = OTHER; note = 2'-fluoroguanosine
  modified_base 20^21: mod_base = OTHER; note = phosphorothioate linkage
  modified_base 21: mod_base = cm
  source 1..21: mol_type = other RNA
ttgatatatgtggtaccatgc

SEQ ID NO: 27 - RNA, 21 nt, synthetic construct
  modified_base 1: mod_base = um
  modified_base 1^2: mod_base = OTHER; note = phosphorothioate linkage
  modified_base 2: mod_base = OTHER; note = 2'-fluorouridine
  modified_base 2^3: mod_base = OTHER; note = phosphorothioate linkage
  modified_base 3: mod_base = um
  modified_base 3^4: mod_base = OTHER; note = phosphorothioate linkage
  modified_base 4: mod_base = OTHER; note = 2'-fluoroadenosine
  modified_base 5: mod_base = cm
  modified_base 6: mod_base = OTHER; note = 2'-fluoroadenosine
  modified_base 7: mod_base = um
  modified_base 8: mod_base = OTHER; note = 2'-fluorocytidine
  modified_base 9: mod_base = cm
  modified_base 10: mod_base = OTHER; note = 2'-fluorouridine
  modified_base 11: mod_base = gm
  modified_base 12: mod_base = OTHER; note = 2'-fluoroadenosine
  modified_base 13: mod_base = um
  modified_base 14: mod_base = OTHER; note = 2'-fluorouridine
  modified_base 15: mod_base = OTHER; note = 2'-O-methyladenosine
  modified_base 16: mod_base = OTHER; note = 2'-fluorouridine
  modified_base 17: mod_base = gm
  modified_base 18: mod_base = OTHER; note = 2'-fluorouridine
  modified_base 19: mod_base = OTHER; note = 2'-O-methyladenosine
  modified_base 20: mod_base = OTHER; note = 2'-fluorocytidine
  modified_base 20^21: mod_base = OTHER; note = phosphorothioate linkage
  modified_base 21: mod_base = cm
  source 1..21: mol_type = other RNA
tttacatcctgattatgtacc

SEQ ID NO: 28 - RNA, 21 nt, synthetic construct
  modified_base 1: mod_base = OTHER; note = 2'-O-methyladenosine
  modified_base 1^2: mod_base = OTHER; note = phosphorothioate linkage
  modified_base 2: mod_base = OTHER; note = 2'-fluoroadenosine
  modified_base 2^3: mod_base = OTHER; note = phosphorothioate linkage
  modified_base 3: mod_base = gm
  modified_base 3^4: mod_base = OTHER; note = phosphorothioate linkage
  modified_base 4: mod_base = OTHER; note = 2'-fluorouridine
  modified_base 5: mod_base = um
  modified_base 6: mod_base = OTHER; note = 2'-fluorouridine
  modified_base 7: mod_base = OTHER; note = 2'-O-methyladenosine
  modified_base 8: mod_base = OTHER; note = 2'-fluorocytidine
  modified_base 9: mod_base = OTHER; note = 2'-O-methyladenosine
  modified_base 10: mod_base = OTHER; note = 2'-fluorouridine
  modified_base 11: mod_base = cm
  modified_base 12: mod_base = OTHER; note = 2'-fluorocytidine
  modified_base 13: mod_base = um
  modified_base 14: mod_base = OTHER; note = 2'-fluoroguanosine
  modified_base 15: mod_base = OTHER; note = 2'-O-methyladenosine
  modified_base 16: mod_base = OTHER; note = 2'-fluorouridine
  modified_base 17: mod_base = um
  modified_base 18: mod_base = OTHER; note = 2'-fluoroadenosine
  modified_base 19: mod_base = um
  modified_base 20: mod_base = OTHER; note = 2'-fluoroguanosine
  modified_base 20^21: mod_base = OTHER; note = phosphorothioate linkage
  modified_base 21: mod_base = cm
  source 1..21: mol_type = other RNA
aagtttacatcctgattatgc

SEQ ID NO: 29 - RNA, 21 nt, synthetic construct
  modified_base 1: mod_base = um
  modified_base 1^2: mod_base = OTHER; note = phosphorothioate linkage
  modified_base 2: mod_base = OTHER; note = 2'-fluoroadenosine
  modified_base 2^3: mod_base = OTHER; note = phosphorothioate linkage
  modified_base 3: mod_base = OTHER; note = 2'-O-methyladenosine
  modified_base 3^4: mod_base = OTHER; note = phosphorothioate linkage
  modified_base 4: mod_base = OTHER; note = 2'-fluoroguanosine
  modified_base 5: mod_base = um
  modified_base 6: mod_base = OTHER; note = 2'-fluorouridine
  modified_base 7: mod_base = um
  modified_base 8: mod_base = OTHER; note = 2'-fluoroadenosine
  modified_base 9: mod_base = cm
  modified_base 10: mod_base = OTHER; note = 2'-fluoroadenosine
  modified_base 11: mod_base = um
  modified_base 12: mod_base = OTHER; note = 2'-fluorocytidine
  modified_base 13: mod_base = cm
  modified_base 14: mod_base = OTHER; note = 2'-fluorouridine
  modified_base 15: mod_base = gm
  modified_base 16: mod_base = OTHER; note = 2'-fluoroadenosine
  modified_base 17: mod_base = um
  modified_base 18: mod_base = OTHER; note = 2'-fluorouridine
  modified_base 19: mod_base = OTHER; note = 2'-O-methyladenosine
  modified_base 20: mod_base = OTHER; note = 2'-fluorouridine
  modified_base 20^21: mod_base = OTHER; note = phosphorothioate linkage
  modified_base 21: mod_base = gm
  source 1..21: mol_type = other RNA
taagtttacatcctgattatg

SEQ ID NO: 30 - RNA, 21 nt, synthetic construct
  modified_base 1: mod_base = um
  modified_base 1^2: mod_base = OTHER; note = phosphorothioate linkage
  modified_base 2: mod_base = OTHER; note = 2'-fluoroadenosine
  modified_base 2^3: mod_base = OTHER; note = phosphorothioate linkage
  modified_base 3: mod_base = gm
  modified_base 3^4: mod_base = OTHER; note = phosphorothioate linkage
  modified_base 4: mod_base = OTHER; note = 2'-fluorocytidine
  modified_base 5: mod_base = um
  modified_base 6: mod_base = OTHER; note = 2'-fluoroadenosine
  modified_base 7: mod_base = um
  modified_base 8: mod_base = OTHER; note = 2'-fluoroguanosine
  modified_base 9: mod_base = um
  modified_base 10: mod_base = OTHER; note = 2'-fluoroadenosine
  modified_base 11: mod_base = OTHER; note = 2'-O-methyladenosine
  modified_base 12: mod_base = OTHER; note = 2'-fluoroguanosine
  modified_base 13: mod_base = um
  modified_base 14: mod_base = OTHER; note = 2'-fluorouridine
  modified_base 15: mod_base = um
  modified_base 16: mod_base = OTHER; note = 2'-fluoroadenosine
  modified_base 17: mod_base = cm
  modified_base 18: mod_base = OTHER; note = 2'-fluoroadenosine
  modified_base 19: mod_base = um
  modified_base 20: mod_base = OTHER; note = 2'-fluorocytidine
  modified_base 20^21: mod_base = OTHER; note = phosphorothioate linkage
  modified_base 21: mod_base = cm
  source 1..21: mol_type = other RNA
tagctatgtaagtttacatcc

SEQ ID NO: 31 - RNA, 21 nt, synthetic construct
  modified_base 1: mod_base = OTHER; note = 2'-O-methyladenosine
  modified_base 1^2: mod_base = OTHER; note = phosphorothioate linkage
  modified_base 2: mod_base = OTHER; note = 2'-fluorouridine
  modified_base 2^3: mod_base = OTHER; note = phosphorothioate linkage
  modified_base 3: mod_base = OTHER; note = 2'-O-methyladenosine
  modified_base 3^4: mod_base = OTHER; note = phosphorothioate linkage
  modified_base 4: mod_base = OTHER; note = 2'-fluoroadenosine
  modified_base 5: mod_base = um
  modified_base 6: mod_base = OTHER; note = 2'-fluoroadenosine
  modified_base 7: mod_base = OTHER; note = 2'-O-methyladenosine
  modified_base 8: mod_base = OTHER; note = 2'-fluoroadenosine
  modified_base 9: mod_base = gm
  modified_base 10: mod_base = OTHER; note = 2'-fluorouridine
  modified_base 11: mod_base = cm
  modified_base 12: mod_base = OTHER; note = 2'-fluorouridine
  modified_base 13: mod_base = OTHER; note = 2'-O-methyladenosine
  modified_base 14: mod_base = OTHER; note = 2'-fluoroguanosine
  modified_base 15: mod_base = cm
  modified_base 16: mod_base = OTHER; note = 2'-fluorocytidine
  modified_base 17: mod_base = um
  modified_base 18: mod_base = OTHER; note = 2'-fluorouridine
  modified_base 19: mod_base = OTHER; note = 2'-O-methyladenosine
  modified_base 20: mod_base = OTHER; note = 2'-fluorocytidine
  modified_base 20^21: mod_base = OTHER; note = phosphorothioate linkage
  modified_base 21: mod_base = cm
  source 1..21: mol_type = other RNA
ataataaagtctagccttacc

SEQ ID NO: 32 - RNA, 21 nt, synthetic construct
  modified_base 1: mod_base = um
  modified_base 1^2: mod_base = OTHER; note = phosphorothioate linkage
  modified_base 2: mod_base = OTHER; note = 2'-fluorouridine
  modified_base 2^3: mod_base = OTHER; note = phosphorothioate linkage
  modified_base 3: mod_base = OTHER; note = 2'-O-methyladenosine
  modified_base 3^4: mod_base = OTHER; note = phosphorothioate linkage
  modified_base 4: mod_base = OTHER; note = 2'-fluorocytidine
  modified_base 5: mod_base = um
  modified_base 6: mod_base = OTHER; note = 2'-fluoroadenosine
  modified_base 7: mod_base = cm
  modified_base 8: mod_base = OTHER; note = 2'-fluoroadenosine
  modified_base 9: mod_base = gm
  modified_base 10: mod_base = OTHER; note = 2'-fluoroadenosine
  modified_base 11: mod_base = um
  modified_base 12: mod_base = OTHER; note = 2'-fluoroadenosine
  modified_base 13: mod_base = gm
  modified_base 14: mod_base = OTHER; note = 2'-fluoroadenosine
  modified_base 15: mod_base = gm
  modified_base 16: mod_base = OTHER; note = 2'-fluoroadenosine
  modified_base 17: mod_base = cm
  modified_base 18: mod_base = OTHER; note = 2'-fluoroadenosine
  modified_base 19: mod_base = cm
  modified_base 20: mod_base = OTHER; note = 2'-fluorocytidine
  modified_base 20^21: mod_base = OTHER; note = phosphorothioate linkage
  modified_base 21: mod_base = OTHER; note = 2'-O-methyladenosine
  source 1..21: mol_type = other RNA
ttactacagatagagacacca

SEQ ID NO: 33 - RNA, 21 nt, synthetic construct
  modified_base 1: mod_base = um
  modified_base 1^2: mod_base = OTHER; note = phosphorothioate linkage
  modified_base 2: mod_base = OTHER; note = 2'-fluoroadenosine
  modified_base 2^3: mod_base = OTHER; note = phosphorothioate linkage
  modified_base 3: mod_base = um
  modified_base 3^4: mod_base = OTHER; note = phosphorothioate linkage
  modified_base 4: mod_base = OTHER; note = 2'-fluoroadenosine
  modified_base 5: mod_base = gm
  modified_base 6: mod_base = OTHER; note = 2'-fluorouridine
  modified_base 7: mod_base = OTHER; note = 2'-O-methyladenosine
  modified_base 8: mod_base = OTHER; note = 2'-fluorocytidine
  modified_base 9: mod_base = um
  modified_base 10: mod_base = OTHER; note = 2'-fluoroadenosine
  modified_base 11: mod_base = cm
  modified_base 12: mod_base = OTHER; note = 2'-fluoroadenosine
  modified_base 13: mod_base = gm
  modified_base 14: mod_base = OTHER; note = 2'-fluoroadenosine
  modified_base 15: mod_base = um
  modified_base 16: mod_base = OTHER; note = 2'-fluoroadenosine
  modified_base 17: mod_base = gm
  modified_base 18: mod_base = OTHER; note = 2'-fluoroadenosine
  modified_base 19: mod_base = gm
  modified_base 20: mod_base = OTHER; note = 2'-fluoroadenosine
  modified_base 20^21: mod_base = OTHER; note = phosphorothioate linkage
  modified_base 21: mod_base = cm
  source 1..21: mol_type = other RNA
tatagtactacagatagagac

SEQ ID NO: 34 - RNA, 21 nt, synthetic construct
  modified_base 1: mod_base = um
  modified_base 1^2: mod_base = OTHER; note = phosphorothioate linkage
  modified_base 2: mod_base = OTHER; note = 2'-fluorocytidine
  modified_base 2^3: mod_base = OTHER; note = phosphorothioate linkage
  modified_base 3: mod_base = OTHER; note = 2'-O-methyladenosine
  modified_base 3^4: mod_base = OTHER; note = phosphorothioate linkage
  modified_base 4: mod_base = OTHER; note = 2'-fluorouridine
  modified_base 5: mod_base = OTHER; note = 2'-O-methyladenosine
  modified_base 6: mod_base = OTHER; note = 2'-fluoroguanosine
  modified_base 7: mod_base = um
  modified_base 8: mod_base = OTHER; note = 2'-fluoroadenosine
  modified_base 9: mod_base = cm
  modified_base 10: mod_base = OTHER; note = 2'-fluorouridine
  modified_base 11: mod_base = OTHER; note = 2'-O-methyladenosine
  modified_base 12: mod_base = OTHER; note = 2'-fluorocytidine
  modified_base 13: mod_base = OTHER; note = 2'-O-methyladenosine
  modified_base 14: mod_base = OTHER; note = 2'-fluoroguanosine
  modified_base 15: mod_base = OTHER; note = 2'-O-methyladenosine
  modified_base 16: mod_base = OTHER; note = 2'-fluorouridine
  modified_base 17: mod_base = OTHER; note = 2'-O-methyladenosine
  modified_base 18: mod_base = OTHER; note = 2'-fluoroguanosine
  modified_base 19: mod_base = OTHER; note = 2'-O-methyladenosine
  modified_base 20: mod_base = OTHER; note = 2'-fluoroguanosine
  modified_base 20^21: mod_base = OTHER; note = phosphorothioate linkage
  modified_base 21: mod_base = cm
  source 1..21: mol_type = other RNA
tcatagtactacagatagagc

SEQ ID NO: 35 - RNA, 21 nt, synthetic construct
  modified_base 1: mod_base = um
  modified_base 1^2: mod_base = OTHER; note = phosphorothioate linkage
  modified_base 2: mod_base = OTHER; note = 2'-fluoroguanosine
  modified_base 2^3: mod_base = OTHER; note = phosphorothioate linkage
  modified_base 3: mod_base = um
  modified_base 3^4: mod_base = OTHER; note = phosphorothioate linkage
  modified_base 4: mod_base = OTHER; note = 2'-fluorocytidine
  modified_base 5: mod_base = OTHER; note = 2'-O-methyladenosine
  modified_base 6: mod_base = OTHER; note = 2'-fluorouridine
  modified_base 7: mod_base = OTHER; note = 2'-O-methyladenosine
  modified_base 8: mod_base = OTHER; note = 2'-fluoroguanosine
  modified_base 9: mod_base = um
  modified_base 10: mod_base = OTHER; note = 2'-fluoroadenosine
  modified_base 11: mod_base = cm
  modified_base 12: mod_base = OTHER; note = 2'-fluorouridine
  modified_base 13: mod_base = OTHER; note = 2'-O-methyladenosine
  modified_base 14: mod_base = OTHER; note = 2'-fluorocytidine
  modified_base 15: mod_base = OTHER; note = 2'-O-methyladenosine
  modified_base 16: mod_base = OTHER; note = 2'-fluoroguanosine
  modified_base 17: mod_base = OTHER; note = 2'-O-methyladenosine
  modified_base 18: mod_base = OTHER; note = 2'-fluorouridine
  modified_base 19: mod_base = OTHER; note = 2'-O-methyladenosine
  modified_base 20: mod_base = OTHER; note = 2'-fluoroguanosine
  modified_base 20^21: mod_base = OTHER; note = phosphorothioate linkage
  modified_base 21: mod_base = cm
  source 1..21: mol_type = other RNA
tgtcatagtactacagatagc

SEQ ID NO: 36 - RNA, 21 nt, synthetic construct
  modified_base 1: mod_base = um
  modified_base 1^2: mod_base = OTHER; note = phosphorothioate linkage
  modified_base 2: mod_base = OTHER; note = 2'-fluoroadenosine
  modified_base 2^3: mod_base = OTHER; note = phosphorothioate linkage
  modified_base 3: mod_base = OTHER; note = 2'-O-methyladenosine
  modified_base 3^4: mod_base = OTHER; note = phosphorothioate linkage
  modified_base 4: mod_base = OTHER; note = 2'-fluorouridine
  modified_base 5: mod_base = um
  modified_base 6: mod_base = OTHER; note = 2'-fluorouridine
  modified_base 7: mod_base = gm
  modified_base 8: mod_base = OTHER; note = 2'-fluorocytidine
  modified_base 9: mod_base = OTHER; note = 2'-O-methyladenosine
  modified_base 10: mod_base = OTHER; note = 2'-fluoroadenosine
  modified_base 11: mod_base = cm
  modified_base 12: mod_base = OTHER; note = 2'-fluoroadenosine
  modified_base 13: mod_base = um
  modified_base 14: mod_base = OTHER; note = 2'-fluorouridine
  modified_base 15: mod_base = gm
  modified_base 16: mod_base = OTHER; note = 2'-fluorocytidine
  modified_base 17: mod_base = um
  modified_base 18: mod_base = OTHER; note = 2'-fluoroadenosine
  modified_base 19: mod_base = gm
  modified_base 20: mod_base = OTHER; note = 2'-fluoroadenosine
  modified_base 20^21: mod_base = OTHER; note = phosphorothioate linkage
  modified_base 21: mod_base = cm
  source 1..21: mol_type = other RNA
taatttgcaacattgctagac

SEQ ID NO: 37 - RNA, 21 nt, synthetic construct
  modified_base 1: mod_base = um
  modified_base 1^2: mod_base = OTHER; note = phosphorothioate linkage
  modified_base 2: mod_base = OTHER; note = 2'-fluorocytidine
  modified_base 2^3: mod_base = OTHER; note = phosphorothioate linkage
  modified_base 3: mod_base = OTHER; note = 2'-O-methyladenosine
  modified_base 3^4: mod_base = OTHER; note = phosphorothioate linkage
  modified_base 4: mod_base = OTHER; note = 2'-fluorouridine
  modified_base 5: mod_base = cm
  modified_base 6: mod_base = OTHER; note = 2'-fluoroadenosine
  modified_base 7: mod_base = um
  modified_base 8: mod_base = OTHER; note = 2'-fluoroadenosine
  modified_base 9: mod_base = gm
  modified_base 10: mod_base = OTHER; note = 2'-fluoroadenosine
  modified_base 11: mod_base = gm
  modified_base 12: mod_base = OTHER; note = 2'-fluoroadenosine
  modified_base 13: mod_base = um
  modified_base 14: mod_base = OTHER; note = 2'-fluoroguanosine
  modified_base 15: mod_base = OTHER; note = 2'-O-methyladenosine
  modified_base 16: mod_base = OTHER; note = 2'-fluoroguanosine
  modified_base 17: mod_base = um
  modified_base 18: mod_base = OTHER; note = 2'-fluorocytidine
  modified_base 19: mod_base = um
  modified_base 20: mod_base = OTHER; note = 2'-fluorouridine
  modified_base 20^21: mod_base = OTHER; note = phosphorothioate linkage
  modified_base 21: mod_base = cm
  source 1..21: mol_type = other RNA
tcatcatagagatgagtcttc

SEQ ID NO: 38 - RNA, 21 nt, synthetic construct
  modified_base 1: mod_base = um
  modified_base 1^2: mod_base = OTHER; note = phosphorothioate linkage
  modified_base 2: mod_base = OTHER; note = 2'-fluorouridine
  modified_base 2^3: mod_base = OTHER; note = phosphorothioate linkage
  modified_base 3: mod_base = cm
  modified_base 3^4: mod_base = OTHER; note = phosphorothioate linkage
  modified_base 4: mod_base = OTHER; note = 2'-fluorocytidine
  modified_base 5: mod_base = OTHER; note = 2'-O-methyladenosine
  modified_base 6: mod_base = OTHER; note = 2'-fluoroadenosine
  modified_base 7: mod_base = um
  modified_base 8: mod_base = OTHER; note = 2'-fluorouridine
  modified_base 9: mod_base = OTHER; note = 2'-O-methyladenosine
  modified_base 10: mod_base = OTHER; note = 2'-fluoroadenosine
  modified_base 11: mod_base = um
  modified_base 12: mod_base = OTHER; note = 2'-fluoroguanosine
  modified_base 13: mod_base = um
  modified_base 14: mod_base = OTHER; note = 2'-fluoroguanosine
  modified_base 15: mod_base = OTHER; note = 2'-O-methyladenosine
  modified_base 16: mod_base = OTHER; note = 2'-fluorocytidine
  modified_base 17: mod_base = um
  modified_base 18: mod_base = OTHER; note = 2'-fluorocytidine
  modified_base 19: mod_base = cm
  modified_base 20: mod_base = OTHER; note = 2'-fluoroadenosine
  modified_base 20^21: mod_base = OTHER; note = phosphorothioate linkage
  modified_base 21: mod_base = cm
  source 1..21: mol_type = other RNA
ttccaattaatgtgactccac

SEQ ID NO: 39 - RNA, 21 nt, synthetic construct
  modified_base 1: mod_base = um
  modified_base 1^2: mod_base = OTHER; note = phosphorothioate linkage
  modified_base 2: mod_base = OTHER; note = 2'-fluoroadenosine
  modified_base 2^3: mod_base = OTHER; note = phosphorothioate linkage
  modified_base 3: mod_base = cm
  modified_base 3^4: mod_base = OTHER; note = phosphorothioate linkage
  modified_base 4: mod_base = OTHER; note = 2'-fluoroadenosine
  modified_base 5: mod_base = um
  modified_base 6: mod_base = OTHER; note = 2'-fluoroadenosine
  modified_base 7: mod_base = OTHER; note = 2'-O-methyladenosine
  modified_base 8: mod_base = OTHER; note = 2'-fluoroguanosine
  modified_base 9: mod_base = um
  modified_base 10: mod_base = OTHER; note = 2'-fluorouridine
  modified_base 11: mod_base = cm
  modified_base 12: mod_base = OTHER; note = 2'-fluoroguanosine
  modified_base 13: mod_base = um
  modified_base 14: mod_base = OTHER; note = 2'-fluoroadenosine
  modified_base 15: mod_base = cm
  modified_base 16: mod_base = OTHER; note = 2'-fluorouridine
  modified_base 17: mod_base = cm
  modified_base 18: mod_base = OTHER; note = 2'-fluoroadenosine
  modified_base 19: mod_base = um
  modified_base 20: mod_base = OTHER; note = 2'-fluorocytidine
  modified_base 20^21: mod_base = OTHER; note = phosphorothioate linkage
  modified_base 21: mod_base = cm
  source 1..21: mol_type = other RNA
tacataagttcgtactcatcc

SEQ ID NO: 40 - RNA, 21 nt, synthetic construct
  modified_base 1: mod_base = um
  modified_base 1^2: mod_base = OTHER; note = phosphorothioate linkage
  modified_base 2: mod_base = OTHER; note = 2'-fluoroguanosine
  modified_base 2^3: mod_base = OTHER; note = phosphorothioate linkage
  modified_base 3: mod_base = OTHER; note = 2'-O-methyladenosine
  modified_base 3^4: mod_base = OTHER; note = phosphorothioate linkage
  modified_base 4: mod_base = OTHER; note = 2'-fluoroadenosine
  modified_base 5: mod_base = um
  modified_base 6: mod_base = OTHER; note = 2'-fluoroguanosine
  modified_base 7: mod_base = OTHER; note = 2'-O-methyladenosine
  modified_base 8: mod_base = OTHER; note = 2'-fluoroguanosine
  modified_base 9: mod_base = um
  modified_base 10: mod_base = OTHER; note = 2'-fluoroadenosine
  modified_base 11: mod_base = cm
  modified_base 12: mod_base = OTHER; note = 2'-fluoroadenosine
  modified_base 13: mod_base = um
  modified_base 14: mod_base = OTHER; note = 2'-fluoroadenosine
  modified_base 15: mod_base = OTHER; note = 2'-O-methyladenosine
  modified_base 16: mod_base = OTHER; note = 2'-fluoroguanosine
  modified_base 17: mod_base = um
  modified_base 18: mod_base = OTHER; note = 2'-fluorouridine
  modified_base 19: mod_base = cm
  modified_base 20: mod_base = OTHER; note = 2'-fluoroguanosine
  modified_base 20^21: mod_base = OTHER; note = phosphorothioate linkage
  modified_base 21: mod_base = um
  source 1..21: mol_type = other RNA
tgaatgagtacataagttcgt

SEQ ID NO: 41 - RNA, 21 nt, synthetic construct
  modified_base 1: mod_base = OTHER; note = 2'-O-methyladenosine
  modified_base 1^2: mod_base = OTHER; note = phosphorothioate linkage
  modified_base 2: mod_base = OTHER; note = 2'-fluorocytidine
  modified_base 2^3: mod_base = OTHER; note = phosphorothioate linkage
  modified_base 3: mod_base = gm
  modified_base 3^4: mod_base = OTHER; note = phosphorothioate linkage
  modified_base 4: mod_base = OTHER; note = 2'-fluoroadenosine
  modified_base 5: mod_base = OTHER; note = 2'-O-methyladenosine
  modified_base 6: mod_base = OTHER; note = 2'-fluorouridine
  modified_base 7: mod_base = gm
  modified_base 8: mod_base = OTHER; note = 2'-fluoroadenosine
  modified_base 9: mod_base = gm
  modified_base 10: mod_base = OTHER; note = 2'-fluorouridine
  modified_base 11: mod_base = OTHER; note = 2'-O-methyladenosine
  modified_base 12: mod_base = OTHER; note = 2'-fluorocytidine
  modified_base 13: mod_base = OTHER; note = 2'-O-methyladenosine
  modified_base 14: mod_base = OTHER; note = 2'-fluorouridine
  modified_base 15: mod_base = OTHER; note = 2'-O-methyladenosine
  modified_base 16: mod_base = OTHER; note = 2'-fluoroadenosine
  modified_base 17: mod_base = gm
  modified_base 18: mod_base = OTHER; note = 2'-fluorouridine
  modified_base 19: mod_base = um
  modified_base 20: mod_base = OTHER; note = 2'-fluorocytidine
  modified_base 20^21: mod_base = OTHER; note = phosphorothioate linkage
  modified_base 21: mod_base = gm
  source 1..21: mol_type = other RNA
acgaatgagtacataagttcg

SEQ ID NO: 42 - RNA, 21 nt, synthetic construct
  modified_base 1: mod_base = um
  modified_base 1^2: mod_base = OTHER; note = phosphorothioate linkage
  modified_base 2: mod_base = OTHER; note = 2'-fluoroguanosine
  modified_base 2^3: mod_base = OTHER; note = phosphorothioate linkage
  modified_base 3: mod_base = OTHER; note = 2'-O-methyladenosine
  modified_base 3^4: mod_base = OTHER; note = phosphorothioate linkage
  modified_base 4: mod_base = OTHER; note = 2'-fluoroadenosine
  modified_base 5: mod_base = OTHER; note = 2'-O-methyladenosine
  modified_base 6: mod_base = OTHER; note = 2'-fluorocytidine
  modified_base 7: mod_base = gm
  modified_base 8: mod_base = OTHER; note = 2'-fluoroadenosine
  modified_base 9: mod_base = OTHER; note = 2'-O-methyladenosine
  modified_base 10: mod_base = OTHER; note = 2'-fluorouridine
  modified_base 11: mod_base = gm
  modified_base 12: mod_base = OTHER; note = 2'-fluoroadenosine
  modified_base 13: mod_base = gm
  modified_base 14: mod_base = OTHER; note = 2'-fluorouridine
  modified_base 15: mod_base = OTHER; note = 2'-O-methyladenosine
  modified_base 16: mod_base = OTHER; note = 2'-fluorocytidine
  modified_base 17: mod_base = OTHER; note = 2'-O-methyladenosine
  modified_base 18: mod_base = OTHER; note = 2'-fluorouridine
  modified_base 19: mod_base = OTHER; note = 2'-O-methyladenosine
  modified_base 20: mod_base = OTHER; note = 2'-fluoroadenosine
  modified_base 20^21: mod_base = OTHER; note = phosphorothioate linkage
  modified_base 21: mod_base = gm
  source 1..21: mol_type = other RNA
tgaaacgaatgagtacataag

SEQ ID NO: 43 - RNA, 21 nt, synthetic construct
  modified_base 1: mod_base = OTHER; note = 2'-O-methyladenosine
  modified_base 1^2: mod_base = OTHER; note = phosphorothioate linkage
  modified_base 2: mod_base = OTHER; note = 2'-fluoroadenosine
  modified_base 2^3: mod_base = OTHER; note = phosphorothioate linkage
  modified_base 3: mod_base = gm
  modified_base 3^4: mod_base = OTHER; note = phosphorothioate linkage
  modified_base 4: mod_base = OTHER; note = 2'-fluoroadenosine
  modified_base 5: mod_base = OTHER; note = 2'-O-methyladenosine
  modified_base 6: mod_base = OTHER; note = 2'-fluoroguanosine
  modified_base 7: mod_base = um
  modified_base 8: mod_base = OTHER; note = 2'-fluoroadenosine
  modified_base 9: mod_base = cm
  modified_base 10: mod_base = OTHER; note = 2'-fluoroguanosine
  modified_base 11: mod_base = cm
  modified_base 12: mod_base = OTHER; note = 2'-fluorouridine
  modified_base 13: mod_base = OTHER; note = 2'-O-methyladenosine
  modified_base 14: mod_base = OTHER; note = 2'-fluorouridine
  modified_base 15: mod_base = um
  modified_base 16: mod_base = OTHER; note = 2'-fluoroadenosine
  modified_base 17: mod_base = OTHER; note = 2'-O-methyladenosine
  modified_base 18: mod_base = OTHER; note = 2'-fluorocytidine
  modified_base 19: mod_base = um
  modified_base 20: mod_base = OTHER; note = 2'-fluoroadenosine
  modified_base 20^21: mod_base = OTHER; note = phosphorothioate linkage
  modified_base 21: mod_base = cm
  source 1..21: mol_type = other RNA
aagaagtacgctattaactac

SEQ ID NO: 44 - DNA, 21 bp, synthetic construct
  modified_base 1: mod_base = OTHER; note = 2'-O-methyladenosine
  modified_base 1^2: mod_base = OTHER; note = phosphorothioate linkage
  modified_base 2: mod_base = OTHER; note = 2'-fluoroadenosine
  modified_base 2^3: mod_base = OTHER; note = phosphorothioate linkage
  modified_base 3: mod_base = gm
  modified_base 3^4: mod_base = OTHER; note = phosphorothioate linkage
  modified_base 4: mod_base = OTHER; note = 2'-fluoroadenosine
  modified_base 5: mod_base = OTHER; note = 2'-O-methyladenosine
  modified_base 6: mod_base = OTHER; note = 2'-fluorouridine
  modified_base 7: mod_base = OTHER; note = 2'-O-methyladenosine
  modified_base 8: mod_base = OTHER; note = 2'-fluorocytidine
  modified_base 9: mod_base = cm
  modified_base 10: mod_base = OTHER; note = 2'-fluoroadenosine
  modified_base 11: mod_base = cm
  modified_base 12: mod_base = OTHER; note = 2'-fluoroguanosine
  modified_base 13: mod_base = OTHER; note = 2'-O-methyladenosine
  modified_base 14: mod_base = OTHER; note = 2'-fluoroadenosine
  modified_base 15: mod_base = OTHER; note = 2'-O-methyladenosine
  modified_base 16: mod_base = OTHER; note = 2'-fluoroguanosine
  modified_base 17: mod_base = cm
  modified_base 18: mod_base = OTHER; note = 2'-fluoroadenosine
  modified_base 19: mod_base = OTHER; note = 2'-O-methyladenosine
  modified_base 20: mod_base = OTHER; note = 2'-fluoroguanosine
  modified_base 20^21: mod_base = OTHER; note = phosphorothioate linkage
  modified_base 21: mod_base = cm
  source 1..21: mol_type = other DNA
aagaataccacgaaagcaagc

SEQ ID NO: 45 - RNA, 21 nt, synthetic construct
  modified_base 1: mod_base = um
  modified_base 1^2: mod_base = OTHER; note = phosphorothioate linkage
  modified_base 2: mod_base = OTHER; note = 2'-fluoroadenosine
  modified_base 2^3: mod_base = OTHER; note = phosphorothioate linkage
  modified_base 3: mod_base = gm
  modified_base 3^4: mod_base = OTHER; note = phosphorothioate linkage
  modified_base 4: mod_base = OTHER; note = 2'-fluorouridine
  modified_base 5: mod_base = OTHER; note = 2'-O-methyladenosine
  modified_base 6: mod_base = OTHER; note = 2'-fluoroadenosine
  modified_base 7: mod_base = gm
  modified_base 8: mod_base = OTHER; note = 2'-fluoroguanosine
  modified_base 9: mod_base = OTHER; note = 2'-O-methyladenosine
  modified_base 10: mod_base = OTHER; note = 2'-fluorouridine
  modified_base 11: mod_base = gm
  modified_base 12: mod_base = OTHER; note = 2'-fluoroguanosine
  modified_base 13: mod_base = cm
  modified_base 14: mod_base = OTHER; note = 2'-fluorouridine
  modified_base 15: mod_base = OTHER; note = 2'-O-methyladenosine
  modified_base 16: mod_base = OTHER; note = 2'-fluoroguanosine
  modified_base 17: mod_base = um
  modified_base 18: mod_base = OTHER; note = 2'-fluoroguanosine
  modified_base 19: mod_base = um
  modified_base 20: mod_base = OTHER; note = 2'-fluoroadenosine
  modified_base 20^21: mod_base = OTHER; note = phosphorothioate linkage
  modified_base 21: mod_base = cm
  source 1..21: mol_type = other RNA
tagtaaggatggctagtgtac

SEQ ID NO: 46 - RNA, 21 nt, synthetic construct
  modified_base 1: mod_base = um
  modified_base 1^2: mod_base = OTHER; note = phosphorothioate linkage
  modified_base 2: mod_base = OTHER; note = 2'-fluorouridine
  modified_base 2^3: mod_base = OTHER; note = phosphorothioate linkage
  modified_base 3: mod_base = OTHER; note = 2'-O-methyladenosine
  modified_base 3^4: mod_base = OTHER; note = phosphorothioate linkage
  modified_base 4: mod_base = OTHER; note = 2'-fluoroadenosine
  modified_base 5: mod_base = cm
  modified_base 6: mod_base = OTHER; note = 2'-fluoroadenosine
  modified_base 7: mod_base = OTHER; note = 2'-O-methyladenosine
  modified_base 8: mod_base = OTHER; note = 2'-fluorouridine
  modified_base 9: mod_base = OTHER; note = 2'-O-methyladenosine
  modified_base 10: mod_base = OTHER; note = 2'-fluorouridine
  modified_base 11: mod_base = um
  modified_base 12: mod_base = OTHER; note = 2'-fluoroguanosine
  modified_base 13: mod_base = cm
  modified_base 14: mod_base = OTHER; note = 2'-fluoroadenosine
  modified_base 15: mod_base = gm
  modified_base 16: mod_base = OTHER; note = 2'-fluorocytidine
  modified_base 17: mod_base = OTHER; note = 2'-O-methyladenosine
  modified_base 18: mod_base = OTHER; note = 2'-fluoroguanosine
  modified_base 19: mod_base = um
  modified_base 20: mod_base = OTHER; note = 2'-fluoroadenosine
  modified_base 20^21: mod_base = OTHER; note = phosphorothioate linkage
  modified_base 21: mod_base = cm
  source 1..21: mol_type = other RNA
ttaacaatattgcagcagtac

SEQ ID NO: 47 - RNA, 21 nt, synthetic construct
  modified_base 1: mod_base = OTHER; note = 2'-O-methyladenosine
  modified_base 1^2: mod_base = OTHER; note = phosphorothioate linkage
  modified_base 2: mod_base = OTHER; note = 2'-fluorocytidine
  modified_base 2^3: mod_base = OTHER; note = phosphorothioate linkage
  modified_base 3: mod_base = gm
  modified_base 3^4: mod_base = OTHER; note = phosphorothioate linkage
  modified_base 4: mod_base = OTHER; note = 2'-fluorouridine
  modified_base 5: mod_base = um
  modified_base 6: mod_base = OTHER; note = 2'-fluoroadenosine
  modified_base 7: mod_base = OTHER; note = 2'-O-methyladenosine
  modified_base 8: mod_base = OTHER; note = 2'-fluorocytidine
  modified_base 9: mod_base = OTHER; note = 2'-O-methyladenosine
  modified_base 10: mod_base = OTHER; note = 2'-fluoroadenosine
  modified_base 11: mod_base = um
  modified_base 12: mod_base = OTHER; note = 2'-fluoroadenosine
  modified_base 13: mod_base = um
  modified_base 14: mod_base = OTHER; note = 2'-fluorouridine
  modified_base 15: mod_base = gm
  modified_base 16: mod_base = OTHER; note = 2'-fluorocytidine
  modified_base 17: mod_base = OTHER; note = 2'-O-methyladenosine
  modified_base 18: mod_base = OTHER; note = 2'-fluoroguanosine
  modified_base 19: mod_base = cm
  modified_base 20: mod_base = OTHER; note = 2'-fluoroadenosine
  modified_base 20^21: mod_base = OTHER; note = phosphorothioate linkage
  modified_base 21: mod_base = gm
  source 1..21: mol_type = other RNA
acgttaacaatattgcagcag

SEQ ID NO: 48 - RNA, 21 nt, synthetic construct
  modified_base 1: mod_base = um
  modified_base 1^2: mod_base = OTHER; note = phosphorothioate linkage
  modified_base 2: mod_base = OTHER; note = 2'-fluoroadenosine
  modified_base 2^3: mod_base = OTHER; note = phosphorothioate linkage
  modified_base 3: mod_base = cm
  modified_base 3^4: mod_base = OTHER; note = phosphorothioate linkage
  modified_base 4: mod_base = OTHER; note = 2'-fluoroguanosine
  modified_base 5: mod_base = um
  modified_base 6: mod_base = OTHER; note = 2'-fluorouridine
  modified_base 7: mod_base = OTHER; note = 2'-O-methyladenosine
  modified_base 8: mod_base = OTHER; note = 2'-fluoroadenosine
  modified_base 9: mod_base = cm
  modified_base 10: mod_base = OTHER; note = 2'-fluoroadenosine
  modified_base 11: mod_base = OTHER; note = 2'-O-methyladenosine
  modified_base 12: mod_base = OTHER; note = 2'-fluorouridine
  modified_base 13: mod_base = OTHER; note = 2'-O-methyladenosine
  modified_base 14: mod_base = OTHER; note = 2'-fluorouridine
  modified_base 15: mod_base = um
  modified_base 16: mod_base = OTHER; note = 2'-fluoroguanosine
  modified_base 17: mod_base = cm
  modified_base 18: mod_base = OTHER; note = 2'-fluoroadenosine
  modified_base 19: mod_base = gm
  modified_base 20: mod_base = OTHER; note = 2'-fluorocytidine
  modified_base 20^21: mod_base = OTHER; note = phosphorothioate linkage
  modified_base 21: mod_base = OTHER; note = 2'-O-methyladenosine
  source 1..21: mol_type = other RNA
tacgttaacaatattgcagca

SEQ ID NO: 49 - RNA, 21 nt, synthetic construct
  modified_base 1: mod_base = um
  modified_base 1^2: mod_base = OTHER; note = phosphorothioate linkage
  modified_base 2: mod_base = OTHER; note = 2'-fluoroguanosine
  modified_base 2^3: mod_base = OTHER; note = phosphorothioate linkage
  modified_base 3: mod_base = um
  modified_base 3^4: mod_base = OTHER; note = phosphorothioate linkage
  modified_base 4: mod_base = OTHER; note = 2'-fluorouridine
  modified_base 5: mod_base = um
  modified_base 6: mod_base = OTHER; note = 2'-fluoroadenosine
  modified_base 7: mod_base = gm
  modified_base 8: mod_base = OTHER; note = 2'-fluoroadenosine
  modified_base 9: mod_base = cm
  modified_base 10: mod_base = OTHER; note = 2'-fluorocytidine
  modified_base 11: mod_base = OTHER; note = 2'-O-methyladenosine
  modified_base 12: mod_base = OTHER; note = 2'-fluoroguanosine
  modified_base 13: mod_base = OTHER; note = 2'-O-methyladenosine
  modified_base 14: mod_base = OTHER; note = 2'-fluoroadenosine
  modified_base 15: mod_base = gm
  modified_base 16: mod_base = OTHER; note = 2'-fluoroadenosine
  modified_base 17: mod_base = um
  modified_base 18: mod_base = OTHER; note = 2'-fluorocytidine
  modified_base 19: mod_base = OTHER; note = 2'-O-methyladenosine
  modified_base 20: mod_base = OTHER; note = 2'-fluoroguanosine
  modified_base 20^21: mod_base = OTHER; note = phosphorothioate linkage
  modified_base 21: mod_base = gm
  source 1..21: mol_type = other RNA
tgtttagaccagaagatcagg

SEQ ID NO: 50 - RNA, 21 nt, synthetic construct
  modified_base 1: mod_base = OTHER; note = 2'-O-methyladenosine
  modified_base 1^2: mod_base = OTHER; note = phosphorothioate linkage
  modified_base 2: mod_base = OTHER; note = 2'-fluoroadenosine
  modified_base 2^3: mod_base = OTHER; note = phosphorothioate linkage
  modified_base 3: mod_base = um
  modified_base 3^4: mod_base = OTHER; note = phosphorothioate linkage
  modified_base 4: mod_base = OTHER; note = 2'-fluoroadenosine
  modified_base 5: mod_base = OTHER; note = 2'-O-methyladenosine
  modified_base 6: mod_base = OTHER; note = 2'-fluoroguanosine
  modified_base 7: mod_base = OTHER; note = 2'-O-methyladenosine
  modified_base 8: mod_base = OTHER; note = 2'-fluoroadenosine
  modified_base 9: mod_base = OTHER; note = 2'-O-methyladenosine
  modified_base 10: mod_base = OTHER; note = 2'-fluoroguanosine
  modified_base 11: mod_base = cm
  modified_base 12: mod_base = OTHER; note = 2'-fluoroguanosine
  modified_base 13: mod_base = um
  modified_base 14: mod_base = OTHER; note = 2'-fluorouridine
  modified_base 15: mod_base = cm
  modified_base 16: mod_base = OTHER; note = 2'-fluoroguanosine
  modified_base 17: mod_base = um
  modified_base 18: mod_base = OTHER; note = 2'-fluoroguanosine
  modified_base 19: mod_base = OTHER; note = 2'-O-methyladenosine
  modified_base 20: mod_base = OTHER; note = 2'-fluorouridine
  modified_base 20^21: mod_base = OTHER; note = phosphorothioate linkage
  modified_base 21: mod_base = gm
  source 1..21: mol_type = other RNA
aataagaaagcgttcgtgatg

SEQ ID NO: 51 - RNA, 21 nt, synthetic construct
  modified_base 1: mod_base = um
  modified_base 1^2: mod_base = OTHER; note = phosphorothioate linkage
  modified_base 2: mod_base = OTHER; note = 2'-fluorouridine
  modified_base 2^3: mod_base = OTHER; note = phosphorothioate linkage
  modified_base 3: mod_base = um
  modified_base 3^4: mod_base = OTHER; note = phosphorothioate linkage
  modified_base 4: mod_base = OTHER; note = 2'-fluoroguanosine
  modified_base 5: mod_base = um
  modified_base 6: mod_base = OTHER; note = 2'-fluoroadenosine
  modified_base 7: mod_base = OTHER; note = 2'-O-methyladenosine
  modified_base 8: mod_base = OTHER; note = 2'-fluorouridine
  modified_base 9: mod_base = OTHER; note = 2'-O-methyladenosine
  modified_base 10: mod_base = OTHER; note = 2'-fluoroadenosine
  modified_base 11: mod_base = gm
  modified_base 12: mod_base = OTHER; note = 2'-fluoroadenosine
  modified_base 13: mod_base = OTHER; note = 2'-O-methyladenosine
  modified_base 14: mod_base = OTHER; note = 2'-fluoroadenosine
  modified_base 15: mod_base = gm
  modified_base 16: mod_base = OTHER; note = 2'-fluorocytidine
  modified_base 17: mod_base = gm
  modified_base 18: mod_base = OTHER; note = 2'-fluorouridine
  modified_base 19: mod_base = um
  modified_base 20: mod_base = OTHER; note = 2'-fluorocytidine
  modified_base 20^21: mod_base = OTHER; note = phosphorothioate linkage
  modified_base 21: mod_base = gm
  source 1..21: mol_type = other RNA
tttgtaataagaaagcgttcg

SEQ ID NO: 52 - RNA, 21 nt, synthetic construct
  modified_base 1: mod_base = um
  modified_base 1^2: mod_base = OTHER; note = phosphorothioate linkage
  modified_base 2: mod_base = OTHER; note = 2'-fluoroadenosine
  modified_base 2^3: mod_base = OTHER; note = phosphorothioate linkage
  modified_base 3: mod_base = um
  modified_base 3^4: mod_base = OTHER; note = phosphorothioate linkage
  modified_base 4: mod_base = OTHER; note = 2'-fluorocytidine
  modified_base 5: mod_base = um
  modified_base 6: mod_base = OTHER; note = 2'-fluoroguanosine
  modified_base 7: mod_base = um
  modified_base 8: mod_base = OTHER; note = 2'-fluorouridine
  modified_base 9: mod_base = gm
  modified_base 10: mod_base = OTHER; note = 2'-fluorouridine
  modified_base 11: mod_base = cm
  modified_base 12: mod_base = OTHER; note = 2'-fluoroadenosine
  modified_base 13: mod_base = cm
  modified_base 14: mod_base = OTHER; note = 2'-fluorouridine
  modified_base 15: mod_base = um
  modified_base 16: mod_base = OTHER; note = 2'-fluoroadenosine
  modified_base 17: mod_base = cm
  modified_base 18: mod_base = OTHER; note = 2'-fluorouridine
  modified_base 19: mod_base = gm
  modified_base 20: mod_base = OTHER; note = 2'-fluorouridine
  modified_base 20^21: mod_base = OTHER; note = phosphorothioate linkage
  modified_base 21: mod_base = cm
  source 1..21: mol_type = other RNA
tatctgttgtcacttactgtc

SEQ ID NO: 53 - RNA, 21 nt, synthetic construct
  modified_base 1: mod_base = OTHER; note = 2'-O-methyladenosine
  modified_base 1^2: mod_base = OTHER; note = phosphorothioate linkage
  modified_base 2: mod_base = OTHER; note = 2'-fluoroadenosine
  modified_base 2^3: mod_base = OTHER; note = phosphorothioate linkage
  modified_base 3: mod_base = cm
  modified_base 3^4: mod_base = OTHER; note = phosphorothioate linkage
  modified_base 4: mod_base = OTHER; note = 2'-fluoroadenosine
  modified_base 5: mod_base = um
  modified_base 6: mod_base = OTHER; note = 2'-fluorocytidine
  modified_base 7: mod_base = um
  modified_base 8: mod_base = OTHER; note = 2'-fluoroguanosine
  modified_base 9: mod_base = um
  modified_base 10: mod_base = OTHER; note = 2'-fluorouridine
  modified_base 11: mod_base = gm
  modified_base 12: mod_base = OTHER; note = 2'-fluorouridine
  modified_base 13: mod_base = cm
  modified_base 14: mod_base = OTHER; note = 2'-fluoroadenosine
  modified_base 15: mod_base = cm
  modified_base 16: mod_base = OTHER; note = 2'-fluorouridine
  modified_base 17: mod_base = um
  modified_base 18: mod_base = OTHER; note = 2'-fluoroadenosine
  modified_base 19: mod_base = cm
  modified_base 20: mod_base = OTHER; note = 2'-fluorouridine
  modified_base 20^21: mod_base = OTHER; note = phosphorothioate linkage
  modified_base 21: mod_base = gm
  source 1..21: mol_type = other RNA
aacatctgttgtcacttactg

SEQ ID NO: 54 - RNA, 21 nt, synthetic construct
  modified_base 1: mod_base = um
  modified_base 1^2: mod_base = OTHER; note = phosphorothioate linkage
  modified_base 2: mod_base = OTHER; note = 2'-fluoroguanosine
  modified_base 2^3: mod_base = OTHER; note = phosphorothioate linkage
  modified_base 3: mod_base = OTHER; note = 2'-O-methyladenosine
  modified_base 3^4: mod_base = OTHER; note = phosphorothioate linkage
  modified_base 4: mod_base = OTHER; note = 2'-fluorouridine
  modified_base 5: mod_base = cm
  modified_base 6: mod_base = OTHER; note = 2'-fluorouridine
  modified_base 7: mod_base = um
  modified_base 8: mod_base = OTHER; note = 2'-fluorouridine
  modified_base 9: mod_base = gm
  modified_base 10: mod_base = OTHER; note = 2'-fluorouridine
  modified_base 11: mod_base = cm
  modified_base 12: mod_base = OTHER; note = 2'-fluoroadenosine
  modified_base 13: mod_base = um
  modified_base 14: mod_base = OTHER; note = 2'-fluorocytidine
  modified_base 15: mod_base = cm
  modified_base 16: mod_base = OTHER; note = 2'-fluoroadenosine
  modified_base 17: mod_base = OTHER; note = 2'-O-methyladenosine
  modified_base 18: mod_base = OTHER; note = 2'-fluorouridine
  modified_base 19: mod_base = um
  modified_base 20: mod_base = OTHER; note = 2'-fluorouridine
  modified_base 20^21: mod_base = OTHER; note = phosphorothioate linkage
  modified_base 21: mod_base = gm
  source 1..21: mol_type = other RNA
tgatctttgtcatccaatttg

SEQ ID NO: 55 - RNA, 21 nt, synthetic construct
  modified_base 1: mod_base = um
  modified_base 1^2: mod_base = OTHER; note = phosphorothioate linkage
  modified_base 2: mod_base = OTHER; note = 2'-fluoroadenosine
  modified_base 2^3: mod_base = OTHER; note = phosphorothioate linkage
  modified_base 3: mod_base = um
  modified_base 3^4: mod_base = OTHER; note = phosphorothioate linkage
  modified_base 4: mod_base = OTHER; note = 2'-fluorouridine
  modified_base 5: mod_base = OTHER; note = 2'-O-methyladenosine
  modified_base 6: mod_base = OTHER; note = 2'-fluoroadenosine
  modified_base 7: mod_base = OTHER; note = 2'-O-methyladenosine
  modified_base 8: mod_base = OTHER; note = 2'-fluoroguanosine
  modified_base 9: mod_base = OTHER; note = 2'-O-methyladenosine
  modified_base 10: mod_base = OTHER; note = 2'-fluorouridine
  modified_base 11: mod_base = um
  modified_base 12: mod_base = OTHER; note = 2'-fluoroguanosine
  modified_base 13: mod_base = cm
  modified_base 14: mod_base = OTHER; note = 2'-fluorouridine
  modified_base 15: mod_base = OTHER; note = 2'-O-methyladenosine
  modified_base 16: mod_base = OTHER; note = 2'-fluorouridine
  modified_base 17: mod_base = gm
  modified_base 18: mod_base = OTHER; note = 2'-fluorouridine
  modified_base 19: mod_base = gm
  modified_base 20: mod_base = OTHER; note = 2'-fluoroadenosine
  modified_base 20^21: mod_base = OTHER; note = phosphorothioate linkage
  modified_base 21: mod_base = gm
  source 1..21: mol_type = other RNA
tattaaagattgctatgtgag

SEQ ID NO: 56 - RNA, 21 nt, synthetic construct
  modified_base 1: mod_base = um
  modified_base 1^2: mod_base = OTHER; note = phosphorothioate linkage
  modified_base 2: mod_base = OTHER; note = 2'-fluorouridine
  modified_base 2^3: mod_base = OTHER; note = phosphorothioate linkage
  modified_base 3: mod_base = gm
  modified_base 3^4: mod_base = OTHER; note = phosphorothioate linkage
  modified_base 4: mod_base = OTHER; note = 2'-fluorouridine
  modified_base 5: mod_base = cm
  modified_base 6: mod_base = OTHER; note = 2'-fluorouridine
  modified_base 7: mod_base = OTHER; note = 2'-O-methyladenosine
  modified_base 8: mod_base = OTHER; note = 2'-fluoroadenosine
  modified_base 9: mod_base = cm
  modified_base 10: mod_base = OTHER; note = 2'-fluoroadenosine
  modified_base 11: mod_base = OTHER; note = 2'-O-methyladenosine
  modified_base 12: mod_base = OTHER; note = 2'-fluorocytidine
  modified_base 13: mod_base = OTHER; note = 2'-O-methyladenosine
  modified_base 14: mod_base = OTHER; note = 2'-fluorouridine
  modified_base 15: mod_base = cm
  modified_base 16: mod_base = OTHER; note = 2'-fluoroadenosine
  modified_base 17: mod_base = OTHER; note = 2'-O-methyladenosine
  modified_base 18: mod_base = OTHER; note = 2'-fluoroadenosine
  modified_base 19: mod_base = OTHER; note = 2'-O-methyladenosine
  modified_base 20: mod_base = OTHER; note = 2'-fluoroguanosine
  modified_base 20^21: mod_base = OTHER; note = phosphorothioate linkage
  modified_base 21: mod_base = gm
  source 1..21: mol_type = other RNA
ttgtctaacaacatcaaaagg

SEQ ID NO: 57 - RNA, 21 nt, synthetic construct
  modified_base 1: mod_base = um
  modified_base 1^2: mod_base = OTHER; note = phosphorothioate linkage
  modified_base 2: mod_base = OTHER; note = 2'-fluorocytidine
  modified_base 2^3: mod_base = OTHER; note = phosphorothioate linkage
  modified_base 3: mod_base = um
  modified_base 3^4: mod_base = OTHER; note = phosphorothioate linkage
  modified_base 4: mod_base = OTHER; note = 2'-fluorouridine
  modified_base 5: mod_base = gm
  modified_base 6: mod_base = OTHER; note = 2'-fluoroadenosine
  modified_base 7: mod_base = um
  modified_base 8: mod_base = OTHER; note = 2'-fluorocytidine
  modified_base 9: mod_base = um
  modified_base 10: mod_base = OTHER; note = 2'-fluoroadenosine
  modified_base 11: mod_base = OTHER; note = 2'-O-methyladenosine
  modified_base 12: mod_base = OTHER; note = 2'-fluoroadenosine
  modified_base 13: mod_base = gm
  modified_base 14: mod_base = OTHER; note = 2'-fluorocytidine
  modified_base 15: mod_base = OTHER; note = 2'-O-methyladenosine
  modified_base 16: mod_base = OTHER; note = 2'-fluorouridine
  modified_base 17: mod_base = um
  modified_base 18: mod_base = OTHER; note = 2'-fluoroadenosine
  modified_base 19: mod_base = cm
  modified_base 20: mod_base = OTHER; note = 2'-fluorocytidine
  modified_base 20^21: mod_base = OTHER; note = phosphorothioate linkage
  modified_base 21: mod_base = OTHER; note = 2'-O-methyladenosine
  source 1..21: mol_type = other RNA
tcttgatctaaagcattacca

SEQ ID NO: 58 - RNA, 21 nt, synthetic construct
  modified_base 1: mod_base = um
  modified_base 1^2: mod_base = OTHER; note = phosphorothioate linkage
  modified_base 2: mod_base = OTHER; note = 2'-fluoroguanosine
  modified_base 2^3: mod_base = OTHER; note = phosphorothioate linkage
  modified_base 3: mod_base = um
  modified_base 3^4: mod_base = OTHER; note = phosphorothioate linkage
  modified_base 4: mod_base = OTHER; note = 2'-fluorouridine
  modified_base 5: mod_base = um
  modified_base 6: mod_base = OTHER; note = 2'-fluoroadenosine
  modified_base 7: mod_base = OTHER; note = 2'-O-methyladenosine
  modified_base 8: mod_base = OTHER; note = 2'-fluorocytidine
  modified_base 9: mod_base = um
  modified_base 10: mod_base = OTHER; note = 2'-fluoroadenosine
  modified_base 11: mod_base = gm
  modified_base 12: mod_base = OTHER; note = 2'-fluorocytidine
  modified_base 13: mod_base = OTHER; note = 2'-O-methyladenosine
  modified_base 14: mod_base = OTHER; note = 2'-fluorouridine
  modified_base 15: mod_base = um
  modified_base 16: mod_base = OTHER; note = 2'-fluoroguanosine
  modified_base 17: mod_base = um
  modified_base 18: mod_base = OTHER; note = 2'-fluoroadenosine
  modified_base 19: mod_base = um
  modified_base 20: mod_base = OTHER; note = 2'-fluoroguanosine
  modified_base 20^21: mod_base = OTHER; note = phosphorothioate linkage
  modified_base 21: mod_base = cm
  source 1..21: mol_type = other RNA
tgtttaactagcattgtatgc

SEQ ID NO: 59 - RNA, 21 nt, synthetic construct
  modified_base 1: mod_base = um
  modified_base 1^2: mod_base = OTHER; note = phosphorothioate linkage
  modified_base 2: mod_base = OTHER; note = 2'-fluorouridine
  modified_base 2^3: mod_base = OTHER; note = phosphorothioate linkage
  modified_base 3: mod_base = gm
  modified_base 3^4: mod_base = OTHER; note = phosphorothioate linkage
  modified_base 4: mod_base = OTHER; note = 2'-fluorouridine
  modified_base 5: mod_base = um
  modified_base 6: mod_base = OTHER; note = 2'-fluorouridine
  modified_base 7: mod_base = OTHER; note = 2'-O-methyladenosine
  modified_base 8: mod_base = OTHER; note = 2'-fluoroadenosine
  modified_base 9: mod_base = cm
  modified_base 10: mod_base = OTHER; note = 2'-fluorouridine
  modified_base 11: mod_base = OTHER; note = 2'-O-methyladenosine
  modified_base 12: mod_base = OTHER; note = 2'-fluoroguanosine
  modified_base 13: mod_base = cm
  modified_base 14: mod_base = OTHER; note = 2'-fluoroadenosine
  modified_base 15: mod_base = um
  modified_base 16: mod_base = OTHER; note = 2'-fluorouridine
  modified_base 17: mod_base = gm
  modified_base 18: mod_base = OTHER; note = 2'-fluorouridine
  modified_base 19: mod_base = OTHER; note = 2'-O-methyladenosine
  modified_base 20: mod_base = OTHER; note = 2'-fluorouridine
  modified_base 20^21: mod_base = OTHER; note = phosphorothioate linkage
  modified_base 21: mod_base = gm
  source 1..21: mol_type = other RNA
ttgtttaactagcattgtatg

SEQ ID NO: 60 - RNA, 21 nt, synthetic construct
  modified_base 1: mod_base = um
  modified_base 1^2: mod_base = OTHER; note = phosphorothioate linkage
  modified_base 2: mod_base = OTHER; note = 2'-fluorocytidine
  modified_base 2^3: mod_base = OTHER; note = phosphorothioate linkage
  modified_base 3: mod_base = um
  modified_base 3^4: mod_base = OTHER; note = phosphorothioate linkage
  modified_base 4: mod_base = OTHER; note = 2'-fluorocytidine
  modified_base 5: mod_base = um
  modified_base 6: mod_base = OTHER; note = 2'-fluoroadenosine
  modified_base 7: mod_base = um
  modified_base 8: mod_base = OTHER; note = 2'-fluorocytidine
  modified_base 9: mod_base = OTHER; note = 2'-O-methyladenosine
  modified_base 10: mod_base = OTHER; note = 2'-fluoroguanosine
  modified_base 11: mod_base = OTHER; note = 2'-O-methyladenosine
  modified_base 12: mod_base = OTHER; note = 2'-fluorocytidine
  modified_base 13: mod_base = OTHER; note = 2'-O-methyladenosine
  modified_base 14: mod_base = OTHER; note = 2'-fluorouridine
  modified_base 15: mod_base = um
  modified_base 16: mod_base = OTHER; note = 2'-fluoroadenosine
  modified_base 17: mod_base = um
  modified_base 18: mod_base = OTHER; note = 2'-fluoroguanosine
  modified_base 19: mod_base = cm
  modified_base 20: mod_base = OTHER; note = 2'-fluoroadenosine
  modified_base 20^21: mod_base = OTHER; note = phosphorothioate linkage
  modified_base 21: mod_base = cm
  source 1..21: mol_type = other RNA
tctctatcagacattatgcac

SEQ ID NO: 61 - RNA, 21 nt, synthetic construct
  modified_base 1: mod_base = um
  modified_base 1^2: mod_base = OTHER; note = phosphorothioate linkage
  modified_base 2: mod_base = OTHER; note = 2'-fluorocytidine
  modified_base 2^3: mod_base = OTHER; note = phosphorothioate linkage
  modified_base 3: mod_base = OTHER; note = 2'-O-methyladenosine
  modified_base 3^4: mod_base = OTHER; note = phosphorothioate linkage
  modified_base 4: mod_base = OTHER; note = 2'-fluorouridine
  modified_base 5: mod_base = um
  modified_base 6: mod_base = OTHER; note = 2'-fluoroadenosine
  modified_base 7: mod_base = OTHER; note = 2'-O-methyladenosine
  modified_base 8: mod_base = OTHER; note = 2'-fluoroguanosine
  modified_base 9: mod_base = OTHER; note = 2'-O-methyladenosine
  modified_base 10: mod_base = OTHER; note = 2'-fluorouridine
  modified_base 11: mod_base = cm
  modified_base 12: mod_base = OTHER; note = 2'-fluorouridine
  modified_base 13: mod_base = gm
  modified_base 14: mod_base = OTHER; note = 2'-fluoroadenosine
  modified_base 15: mod_base = OTHER; note = 2'-O-methyladenosine
  modified_base 16: mod_base = OTHER; note = 2'-fluorouridine
  modified_base 17: mod_base = cm
  modified_base 18: mod_base = OTHER; note = 2'-fluoroguanosine
  modified_base 19: mod_base = OTHER; note = 2'-O-methyladenosine
  modified_base 20: mod_base = OTHER; note = 2'-fluorocytidine
  modified_base 20^21: mod_base = OTHER; note = phosphorothioate linkage
  modified_base 21: mod_base = cm
  source 1..21: mol_type = other RNA
tcattaagatctgaatcgacc

SEQ ID NO: 62 - RNA, 21 nt, synthetic construct
  modified_base 1: mod_base = um
  modified_base 1^2: mod_base = OTHER; note = phosphorothioate linkage
  modified_base 2: mod_base = OTHER; note = 2'-fluorocytidine
  modified_base 2^3: mod_base = OTHER; note = phosphorothioate linkage
  modified_base 3: mod_base = cm
  modified_base 3^4: mod_base = OTHER; note = phosphorothioate linkage
  modified_base 4: mod_base = OTHER; note = 2'-fluoroadenosine
  modified_base 5: mod_base = OTHER; note = 2'-O-methyladenosine
  modified_base 6: mod_base = OTHER; note = 2'-fluorouridine
  modified_base 7: mod_base = um
  modified_base 8: mod_base = OTHER; note = 2'-fluorouridine
  modified_base 9: mod_base = gm
  modified_base 10: mod_base = OTHER; note = 2'-fluoroguanosine
  modified_base 11: mod_base = um
  modified_base 12: mod_base = OTHER; note = 2'-fluorocytidine
  modified_base 13: mod_base = OTHER; note = 2'-O-methyladenosine
  modified_base 14: mod_base = OTHER; note = 2'-fluorouridine
  modified_base 15: mod_base = cm
  modified_base 16: mod_base = OTHER; note = 2'-fluorouridine
  modified_base 17: mod_base = gm
  modified_base 18: mod_base = OTHER; note = 2'-fluoroguanosine
  modified_base 19: mod_base = OTHER; note = 2'-O-methyladenosine
  modified_base 20: mod_base = OTHER; note = 2'-fluorocytidine
  modified_base 20^21: mod_base = OTHER; note = phosphorothioate linkage
  modified_base 21: mod_base = cm
  source 1..21: mol_type = other RNA
tccaatttggtcatctggacc

SEQ ID NO: 63 - RNA, 21 nt, synthetic construct
  modified_base 1: mod_base = um
  modified_base 1^2: mod_base = OTHER; note = phosphorothioate linkage
  modified_base 2: mod_base = OTHER; note = 2'-fluorocytidine
  modified_base 2^3: mod_base = OTHER; note = phosphorothioate linkage
  modified_base 3: mod_base = OTHER; note = 2'-O-methyladenosine
  modified_base 3^4: mod_base = OTHER; note = phosphorothioate linkage
  modified_base 4: mod_base = OTHER; note = 2'-fluoroadenosine
  modified_base 5: mod_base = OTHER; note = 2'-O-methyladenosine
  modified_base 6: mod_base = OTHER; note = 2'-fluorouridine
  modified_base 7: mod_base = um
  modified_base 8: mod_base = OTHER; note = 2'-fluoroguanosine
  modified_base 9: mod_base = um
  modified_base 10: mod_base = OTHER; note = 2'-fluoroguanosine
  modified_base 11: mod_base = cm
  modified_base 12: mod_base = OTHER; note = 2'-fluoroadenosine
  modified_base 13: mod_base = OTHER; note = 2'-O-methyladenosine
  modified_base 14: mod_base = OTHER; note = 2'-fluorouridine
  modified_base 15: mod_base = um
  modified_base 16: mod_base = OTHER; note = 2'-fluorouridine
  modified_base 17: mod_base = gm
  modified_base 18: mod_base = OTHER; note = 2'-fluorocytidine
  modified_base 19: mod_base = gm
  modified_base 20: mod_base = OTHER; note = 2'-fluoroguanosine
  modified_base 20^21: mod_base = OTHER; note = phosphorothioate linkage
  modified_base 21: mod_base = cm
  source 1..21: mol_type = other RNA
tcaaattgtgcaatttgcggc

SEQ ID NO: 64 - RNA, 21 nt, synthetic construct
  modified_base 1: mod_base = um
  modified_base 1^2: mod_base = OTHER; note = phosphorothioate linkage
  modified_base 2: mod_base = OTHER; note = 2'-fluoroguanosine
  modified_base 2^3: mod_base = OTHER; note = phosphorothioate linkage
  modified_base 3: mod_base = OTHER; note = 2'-O-methyladenosine
  modified_base 3^4: mod_base = OTHER; note = phosphorothioate linkage
  modified_base 4: mod_base = OTHER; note = 2'-fluoroadenosine
  modified_base 5: mod_base = um
  modified_base 6: mod_base = OTHER; note = 2'-fluoroguanosine
  modified_base 7: mod_base = um
  modified_base 8: mod_base = OTHER; note = 2'-fluorouridine
  modified_base 9: mod_base = um
  modified_base 10: mod_base = OTHER; note = 2'-fluorouridine
  modified_base 11: mod_base = gm
  modified_base 12: mod_base = OTHER; note = 2'-fluorouridine
  modified_base 13: mod_base = OTHER; note = 2'-O-methyladenosine
  modified_base 14: mod_base = OTHER; note = 2'-fluorouridine
  modified_base 15: mod_base = gm
  modified_base 16: mod_base = OTHER; note = 2'-fluorocytidine
  modified_base 17: mod_base = gm
  modified_base 18: mod_base = OTHER; note = 2'-fluorouridine
  modified_base 19: mod_base = cm
  modified_base 20: mod_base = OTHER; note = 2'-fluoroadenosine
  modified_base 20^21: mod_base = OTHER; note = phosphorothioate linkage
  modified_base 21: mod_base = cm
  source 1..21: mol_type = other RNA
tgaatgttttgtatgcgtcac

SEQ ID NO: 65 - RNA, 21 nt, synthetic construct
  modified_base 1: mod_base = um
  modified_base 1^2: mod_base = OTHER; note = phosphorothioate linkage
  modified_base 2: mod_base = OTHER; note = 2'-fluoroguanosine
  modified_base 2^3: mod_base = OTHER; note = phosphorothioate linkage
  modified_base 3: mod_base = gm
  modified_base 3^4: mod_base = OTHER; note = phosphorothioate linkage
  modified_base 4: mod_base = OTHER; note = 2'-fluoroadenosine
  modified_base 5: mod_base = OTHER; note = 2'-O-methyladenosine
  modified_base 6: mod_base = OTHER; note = 2'-fluorouridine
  modified_base 7: mod_base = um
  modified_base 8: mod_base = OTHER; note = 2'-fluorouridine
  modified_base 9: mod_base = OTHER; note = 2'-O-methyladenosine
  modified_base 10: mod_base = OTHER; note = 2'-fluoroadenosine
  modified_base 11: mod_base = gm
  modified_base 12: mod_base = OTHER; note = 2'-fluoroguanosine
  modified_base 13: mod_base = um
  modified_base 14: mod_base = OTHER; note = 2'-fluorocytidine
  modified_base 15: mod_base = um
  modified_base 16: mod_base = OTHER; note = 2'-fluorouridine
  modified_base 17: mod_base = cm
  modified_base 18: mod_base = OTHER; note = 2'-fluorocytidine
  modified_base 19: mod_base = um
  modified_base 20: mod_base = OTHER; note = 2'-fluorouridine
  modified_base 20^21: mod_base = OTHER; note = phosphorothioate linkage
  modified_base 21: mod_base = gm
  source 1..21: mol_type = other RNA
tggaatttaaggtcttccttg

SEQ ID NO: 66 - RNA, 21 nt, synthetic construct
  modified_base 1: mod_base = um
  modified_base 1^2: mod_base = OTHER; note = phosphorothioate linkage
  modified_base 2: mod_base = OTHER; note = 2'-fluoroguanosine
  modified_base 2^3: mod_base = OTHER; note = phosphorothioate linkage
  modified_base 3: mod_base = cm
  modified_base 3^4: mod_base = OTHER; note = phosphorothioate linkage
  modified_base 4: mod_base = OTHER; note = 2'-fluorouridine
  modified_base 5: mod_base = OTHER; note = 2'-O-methyladenosine
  modified_base 6: mod_base = OTHER; note = 2'-fluorouridine
  modified_base 7: mod_base = um
  modified_base 8: mod_base = OTHER; note = 2'-fluoroguanosine
  modified_base 9: mod_base = gm
  modified_base 10: mod_base = OTHER; note = 2'-fluorouridine
  modified_base 11: mod_base = gm
  modified_base 12: mod_base = OTHER; note = 2'-fluorouridine
  modified_base 13: mod_base = um
  modified_base 14: mod_base = OTHER; note = 2'-fluoroadenosine
  modified_base 15: mod_base = OTHER; note = 2'-O-methyladenosine
  modified_base 16: mod_base = OTHER; note = 2'-fluorouridine
  modified_base 17: mod_base = um
  modified_base 18: mod_base = OTHER; note = 2'-fluoroguanosine
  modified_base 19: mod_base = gm
  modified_base 20: mod_base = OTHER; note = 2'-fluoroadenosine
  modified_base 20^21: mod_base = OTHER; note = phosphorothioate linkage
  modified_base 21: mod_base = cm
  source 1..21: mol_type = other RNA
tgctattggtgttaattggac

SEQ ID NO: 67 - RNA, 21 nt, synthetic construct
  modified_base 1: mod_base = OTHER; note = 2'-O-methyladenosine
  modified_base 1^2: mod_base = OTHER; note = phosphorothioate linkage
  modified_base 2: mod_base = OTHER; note = 2'-fluoroguanosine
  modified_base 2^3: mod_base = OTHER; note = phosphorothioate linkage
  modified_base 3: mod_base = um
  modified_base 3^4: mod_base = OTHER; note = phosphorothioate linkage
  modified_base 4: mod_base = OTHER; note = 2'-fluoroadenosine
  modified_base 5: mod_base = gm
  modified_base 6: mod_base = OTHER; note = 2'-fluoroadenosine
  modified_base 7: mod_base = OTHER; note = 2'-O-methyladenosine
  modified_base 8: mod_base = OTHER; note = 2'-fluoroadenosine
  modified_base 9: mod_base = um
  modified_base 10: mod_base = OTHER; note = 2'-fluoroadenosine
  modified_base 11: mod_base = cm
  modified_base 12: mod_base = OTHER; note = 2'-fluorocytidine
  modified_base 13: mod_base = OTHER; note = 2'-O-methyladenosine
  modified_base 14: mod_base = OTHER; note = 2'-fluorouridine
  modified_base 15: mod_base = cm
  modified_base 16: mod_base = OTHER; note = 2'-fluorouridine
  modified_base 17: mod_base = um
  modified_base 18: mod_base = OTHER; note = 2'-fluoroguanosine
  modified_base 19: mod_base = gm
  modified_base 20: mod_base = OTHER; note = 2'-fluoroadenosine
  modified_base 20^21: mod_base = OTHER; note = phosphorothioate linkage
  modified_base 21: mod_base = cm
  source 1..21: mol_type = other RNA
agtagaaataccatcttggac

SEQ ID NO: 68 - RNA, 21 nt, synthetic construct
  modified_base 1: mod_base = um
  modified_base 1^2: mod_base = OTHER; note = phosphorothioate linkage
  modified_base 2: mod_base = OTHER; note = 2'-fluoroguanosine
  modified_base 2^3: mod_base = OTHER; note = phosphorothioate linkage
  modified_base 3: mod_base = um
  modified_base 3^4: mod_base = OTHER; note = phosphorothioate linkage
  modified_base 4: mod_base = OTHER; note = 2'-fluoroadenosine
  modified_base 5: mod_base = gm
  modified_base 6: mod_base = OTHER; note = 2'-fluorouridine
  modified_base 7: mod_base = OTHER; note = 2'-O-methyladenosine
  modified_base 8: mod_base = OTHER; note = 2'-fluoroguanosine
  modified_base 9: mod_base = OTHER; note = 2'-O-methyladenosine
  modified_base 10: mod_base = OTHER; note = 2'-fluoroadenosine
  modified_base 11: mod_base = OTHER; note = 2'-O-methyladenosine
  modified_base 12: mod_base = OTHER; note = 2'-fluorouridine
  modified_base 13: mod_base = OTHER; note = 2'-O-methyladenosine
  modified_base 14: mod_base = OTHER; note = 2'-fluorocytidine
  modified_base 15: mod_base = cm
  modified_base 16: mod_base = OTHER; note = 2'-fluoroadenosine
  modified_base 17: mod_base = um
  modified_base 18: mod_base = OTHER; note = 2'-fluorocytidine
  modified_base 19: mod_base = um
  modified_base 20: mod_base = OTHER; note = 2'-fluorouridine
  modified_base 20^21: mod_base = OTHER; note = phosphorothioate linkage
  modified_base 21: mod_base = gm
  source 1..21: mol_type = other RNA
tgtagtagaaataccatcttg

SEQ ID NO: 69 - RNA, 21 nt, synthetic construct
  modified_base 1: mod_base = um
  modified_base 1^2: mod_base = OTHER; note = phosphorothioate linkage
  modified_base 2: mod_base = OTHER; note = 2'-fluorouridine
  modified_base 2^3: mod_base = OTHER; note = phosphorothioate linkage
  modified_base 3: mod_base = gm
  modified_base 3^4: mod_base = OTHER; note = phosphorothioate linkage
  modified_base 4: mod_base = OTHER; note = 2'-fluoroadenosine
  modified_base 5: mod_base = um
  modified_base 6: mod_base = OTHER; note = 2'-fluorocytidine
  modified_base 7: mod_base = um
  modified_base 8: mod_base = OTHER; note = 2'-fluorouridine
  modified_base 9: mod_base = um
  modified_base 10: mod_base = OTHER; note = 2'-fluorouridine
  modified_base 11: mod_base = gm
  modified_base 12: mod_base = OTHER; note = 2'-fluoroguanosine
  modified_base 13: mod_base = um
  modified_base 14: mod_base = OTHER; note = 2'-fluoroguanosine
  modified_base 15: mod_base = um
  modified_base 16: mod_base = OTHER; note = 2'-fluoroadenosine
  modified_base 17: mod_base = um
  modified_base 18: mod_base = OTHER; note = 2'-fluorouridine
  modified_base 19: mod_base = cm
  modified_base 20: mod_base = OTHER; note = 2'-fluoroadenosine
  modified_base 20^21: mod_base = OTHER; note = phosphorothioate linkage
  modified_base 21: mod_base = cm
  source 1..21: mol_type = other RNA
ttgatcttttggtgtattcac

SEQ ID NO: 70 - RNA, 21 nt, synthetic construct
  modified_base 1: mod_base = um
  modified_base 1^2: mod_base = OTHER; note = phosphorothioate linkage
  modified_base 2: mod_base = OTHER; note = 2'-fluoroadenosine
  modified_base 2^3: mod_base = OTHER; note = phosphorothioate linkage
  modified_base 3: mod_base = gm
  modified_base 3^4: mod_base = OTHER; note = phosphorothioate linkage
  modified_base 4: mod_base = OTHER; note = 2'-fluorocytidine
  modified_base 5: mod_base = OTHER; note = 2'-O-methyladenosine
  modified_base 6: mod_base = OTHER; note = 2'-fluoroguanosine
  modified_base 7: mod_base = OTHER; note = 2'-O-methyladenosine
  modified_base 8: mod_base = OTHER; note = 2'-fluorouridine
  modified_base 9: mod_base = um
  modified_base 10: mod_base = OTHER; note = 2'-fluorouridine
  modified_base 11: mod_base = cm
  modified_base 12: mod_base = OTHER; note = 2'-fluorouridine
  modified_base 13: mod_base = um
  modified_base 14: mod_base = OTHER; note = 2'-fluoroadenosine
  modified_base 15: mod_base = gm
  modified_base 16: mod_base = OTHER; note = 2'-fluorouridine
  modified_base 17: mod_base = gm
  modified_base 18: mod_base = OTHER; note = 2'-fluoroadenosine
  modified_base 19: mod_base = cm
  modified_base 20: mod_base = OTHER; note = 2'-fluoroadenosine
  modified_base 20^21: mod_base = OTHER; note = phosphorothioate linkage
  modified_base 21: mod_base = gm
  source 1..21: mol_type = other RNA
tagcagatttcttagtgacag

SEQ ID NO: 71 - RNA, 21 nt, synthetic construct
  modified_base 1: mod_base = um
  modified_base 1^2: mod_base = OTHER; note = phosphorothioate linkage
  modified_base 2: mod_base = OTHER; note = 2'-fluorouridine
  modified_base 2^3: mod_base = OTHER; note = phosphorothioate linkage
  modified_base 3: mod_base = OTHER; note = 2'-O-methyladenosine
  modified_base 3^4: mod_base = OTHER; note = phosphorothioate linkage
  modified_base 4: mod_base = OTHER; note = 2'-fluorocytidine
  modified_base 5: mod_base = OTHER; note = 2'-O-methyladenosine
  modified_base 6: mod_base = OTHER; note = 2'-fluorouridine
  modified_base 7: mod_base = um
  modified_base 8: mod_base = OTHER; note = 2'-fluoroguanosine
  modified_base 9: mod_base = um
  modified_base 10: mod_base = OTHER; note = 2'-fluoroadenosine
  modified_base 11: mod_base = um
  modified_base 12: mod_base = OTHER; note = 2'-fluoroguanosine
  modified_base 13: mod_base = cm
  modified_base 14: mod_base = OTHER; note = 2'-fluorouridine
  modified_base 15: mod_base = um
  modified_base 16: mod_base = OTHER; note = 2'-fluorouridine
  modified_base 17: mod_base = OTHER; note = 2'-O-methyladenosine
  modified_base 18: mod_base = OTHER; note = 2'-fluoroguanosine
  modified_base 19: mod_base = um
  modified_base 20: mod_base = OTHER; note = 2'-fluoroguanosine
  modified_base 20^21: mod_base = OTHER; note = phosphorothioate linkage
  modified_base 21: mod_base = gm
  source 1..21: mol_type = other RNA
ttacattgtatgctttagtgg

SEQ ID NO: 72 - RNA, 21 nt, synthetic construct
  modified_base 1: mod_base = um
  modified_base 1^2: mod_base = OTHER; note = phosphorothioate linkage
  modified_base 2: mod_base = OTHER; note = 2'-fluoroguanosine
  modified_base 2^3: mod_base = OTHER; note = phosphorothioate linkage
  modified_base 3: mod_base = um
  modified_base 3^4: mod_base = OTHER; note = phosphorothioate linkage
  modified_base 4: mod_base = OTHER; note = 2'-fluoroadenosine
  modified_base 5: mod_base = OTHER; note = 2'-O-methyladenosine
  modified_base 6: mod_base = OTHER; note = 2'-fluorouridine
  modified_base 7: mod_base = cm
  modified_base 8: mod_base = OTHER; note = 2'-fluoroadenosine
  modified_base 9: mod_base = gm
  modified_base 10: mod_base = OTHER; note = 2'-fluorouridine
  modified_base 11: mod_base = um
  modified_base 12: mod_base = OTHER; note = 2'-fluorocytidine
  modified_base 13: mod_base = cm
  modified_base 14: mod_base = OTHER; note = 2'-fluorouridine
  modified_base 15: mod_base = um
  modified_base 16: mod_base = OTHER; note = 2'-fluoroguanosine
  modified_base 17: mod_base = um
  modified_base 18: mod_base = OTHER; note = 2'-fluorocytidine
  modified_base 19: mod_base = um
  modified_base 20: mod_base = OTHER; note = 2'-fluoroguanosine
  modified_base 20^21: mod_base = OTHER; note = phosphorothioate linkage
  modified_base 21: mod_base = cm
  source 1..21: mol_type = other RNA
tgtaatcagttccttgtctgc

SEQ ID NO: 73 - RNA, 21 nt, synthetic construct
  modified_base 1: mod_base = um
  modified_base 1^2: mod_base = OTHER; note = phosphorothioate linkage
  modified_base 2: mod_base = OTHER; note = 2'-fluorouridine
  modified_base 2^3: mod_base = OTHER; note = phosphorothioate linkage
  modified_base 3: mod_base = um
  modified_base 3^4: mod_base = OTHER; note = phosphorothioate linkage
  modified_base 4: mod_base = OTHER; note = 2'-fluoroguanosine
  modified_base 5: mod_base = um
  modified_base 6: mod_base = OTHER; note = 2'-fluoroadenosine
  modified_base 7: mod_base = OTHER; note = 2'-O-methyladenosine
  modified_base 8: mod_base = OTHER; note = 2'-fluorouridine
  modified_base 9: mod_base = cm
  modified_base 10: mod_base = OTHER; note = 2'-fluoroadenosine
  modified_base 11: mod_base = gm
  modified_base 12: mod_base = OTHER; note = 2'-fluorouridine
  modified_base 13: mod_base = um
  modified_base 14: mod_base = OTHER; note = 2'-fluorocytidine
  modified_base 15: mod_base = cm
  modified_base 16: mod_base = OTHER; note = 2'-fluorouridine
  modified_base 17: mod_base = um
  modified_base 18: mod_base = OTHER; note = 2'-fluoroguanosine
  modified_base 19: mod_base = um
  modified_base 20: mod_base = OTHER; note = 2'-fluorocytidine
  modified_base 20^21: mod_base = OTHER; note = phosphorothioate linkage
  modified_base 21: mod_base = cm
  source 1..21: mol_type = other RNA
tttgtaatcagttccttgtcc

SEQ ID NO: 74 - RNA, 21 nt, synthetic construct
  modified_base 1: mod_base = um
  modified_base 1^2: mod_base = OTHER; note = phosphorothioate linkage
  modified_base 2: mod_base = OTHER; note = 2'-fluorocytidine
  modified_base 2^3: mod_base = OTHER; note = phosphorothioate linkage
  modified_base 3: mod_base = OTHER; note = 2'-O-methyladenosine
  modified_base 3^4: mod_base = OTHER; note = phosphorothioate linkage
  modified_base 4: mod_base = OTHER; note = 2'-fluoroadenosine
  modified_base 5: mod_base = um
  modified_base 6: mod_base = OTHER; note = 2'-fluoroguanosine
  modified_base 7: mod_base = um
  modified_base 8: mod_base = OTHER; note = 2'-fluorouridine
  modified_base 9: mod_base = um
  modified_base 10: mod_base = OTHER; note = 2'-fluoroguanosine
  modified_base 11: mod_base = um
  modified_base 12: mod_base = OTHER; note = 2'-fluoroadenosine
  modified_base 13: mod_base = OTHER; note = 2'-O-methyladenosine
  modified_base 14: mod_base = OTHER; note = 2'-fluorouridine
  modified_base 15: mod_base = cm
  modified_base 16: mod_base = OTHER; note = 2'-fluoroadenosine
  modified_base 17: mod_base = gm
  modified_base 18: mod_base = OTHER; note = 2'-fluorouridine
  modified_base 19: mod_base = um
  modified_base 20: mod_base = OTHER; note = 2'-fluorocytidine
  modified_base 20^21: mod_base = OTHER; note = phosphorothioate linkage
  modified_base 21: mod_base = cm
  source 1..21: mol_type = other RNA
tcaatgtttgtaatcagttcc

SEQ ID NO: 75 - RNA, 21 nt, synthetic construct
  modified_base 1: mod_base = um
  modified_base 1^2: mod_base = OTHER; note = phosphorothioate linkage
  modified_base 2: mod_base = OTHER; note = 2'-fluorocytidine
  modified_base 2^3: mod_base = OTHER; note = phosphorothioate linkage
  modified_base 3: mod_base = gm
  modified_base 3^4: mod_base = OTHER; note = phosphorothioate linkage
  modified_base 4: mod_base = OTHER; note = 2'-fluorouridine
  modified_base 5: mod_base = cm
  modified_base 6: mod_base = OTHER; note = 2'-fluoroadenosine
  modified_base 7: mod_base = OTHER; note = 2'-O-methyladenosine
  modified_base 8: mod_base = OTHER; note = 2'-fluorouridine
  modified_base 9: mod_base = OTHER; note = 2'-O-methyladenosine
  modified_base 10: mod_base = OTHER; note = 2'-fluorouridine
  modified_base 11: mod_base = gm
  modified_base 12: mod_base = OTHER; note = 2'-fluorocytidine
  modified_base 13: mod_base = um
  modified_base 14: mod_base = OTHER; note = 2'-fluorouridine
  modified_base 15: mod_base = OTHER; note = 2'-O-methyladenosine
  modified_base 16: mod_base = OTHER; note = 2'-fluorouridine
  modified_base 17: mod_base = um
  modified_base 18: mod_base = OTHER; note = 2'-fluorocytidine
  modified_base 19: mod_base = OTHER; note = 2'-O-methyladenosine
  modified_base 20: mod_base = OTHER; note = 2'-fluoroguanosine
  modified_base 20^21: mod_base = OTHER; note = phosphorothioate linkage
  modified_base 21: mod_base = cm
  source 1..21: mol_type = other RNA
tcgtcaatatgcttattcagc

SEQ ID NO: 76 - RNA, 21 nt, synthetic construct
  modified_base 1: mod_base = um
  modified_base 1^2: mod_base = OTHER; note = phosphorothioate linkage
  modified_base 2: mod_base = OTHER; note = 2'-fluorocytidine
  modified_base 2^3: mod_base = OTHER; note = phosphorothioate linkage
  modified_base 3: mod_base = OTHER; note = 2'-O-methyladenosine
  modified_base 3^4: mod_base = OTHER; note = phosphorothioate linkage
  modified_base 4: mod_base = OTHER; note = 2'-fluorouridine
  modified_base 5: mod_base = OTHER; note = 2'-O-methyladenosine
  modified_base 6: mod_base = OTHER; note = 2'-fluoroadenosine
  modified_base 7: mod_base = gm
  modified_base 8: mod_base = OTHER; note = 2'-fluorocytidine
  modified_base 9: mod_base = OTHER; note = 2'-O-methyladenosine
  modified_base 10: mod_base = OTHER; note = 2'-fluorocytidine
  modified_base 11: mod_base = um
  modified_base 12: mod_base = OTHER; note = 2'-fluorocytidine
  modified_base 13: mod_base = um
  modified_base 14: mod_base = OTHER; note = 2'-fluorouridine
  modified_base 15: mod_base = OTHER; note = 2'-O-methyladenosine
  modified_base 16: mod_base = OTHER; note = 2'-fluoroadenosine
  modified_base 17: mod_base = gm
  modified_base 18: mod_base = OTHER; note = 2'-fluoroadenosine
  modified_base 19: mod_base = OTHER; note = 2'-O-methyladenosine
  modified_base 20: mod_base = OTHER; note = 2'-fluoroguanosine
  modified_base 20^21: mod_base = OTHER; note = phosphorothioate linkage
  modified_base 21: mod_base = cm
  source 1..21: mol_type = other RNA
tcataagcactcttaagaagc

SEQ ID NO: 77 - RNA, 21 nt, synthetic construct
  modified_base 1: mod_base = um
  modified_base 1^2: mod_base = OTHER; note = phosphorothioate linkage
  modified_base 2: mod_base = OTHER; note = 2'-fluorouridine
  modified_base 2^3: mod_base = OTHER; note = phosphorothioate linkage
  modified_base 3: mod_base = OTHER; note = 2'-O-methyladenosine
  modified_base 3^4: mod_base = OTHER; note = phosphorothioate linkage
  modified_base 4: mod_base = OTHER; note = 2'-fluoroguanosine
  modified_base 5: mod_base = OTHER; note = 2'-O-methyladenosine
  modified_base 6: mod_base = OTHER; note = 2'-fluorouridine
  modified_base 7: mod_base = OTHER; note = 2'-O-methyladenosine
  modified_base 8: mod_base = OTHER; note = 2'-fluoroadenosine
  modified_base 9: mod_base = gm
  modified_base 10: mod_base = OTHER; note = 2'-fluoroadenosine
  modified_base 11: mod_base = cm
  modified_base 12: mod_base = OTHER; note = 2'-fluoroadenosine
  modified_base 13: mod_base = um
  modified_base 14: mod_base = OTHER; note = 2'-fluorouridine
  modified_base 15: mod_base = gm
  modified_base 16: mod_base = OTHER; note = 2'-fluorouridine
  modified_base 17: mod_base = cm
  modified_base 18: mod_base = OTHER; note = 2'-fluorouridine
  modified_base 19: mod_base = OTHER; note = 2'-O-methyladenosine
  modified_base 20: mod_base = OTHER; note = 2'-fluoroadenosine
  modified_base 20^21: mod_base = OTHER; note = phosphorothioate linkage
  modified_base 21: mod_base = gm
  source 1..21: mol_type = other RNA
ttagataagacattgtctaag

SEQ ID NO: 78 - RNA, 21 nt, synthetic construct
  modified_base 1: mod_base = um
  modified_base 1^2: mod_base = OTHER; note = phosphorothioate linkage
  modified_base 2: mod_base = OTHER; note = 2'-fluoroadenosine
  modified_base 2^3: mod_base = OTHER; note = phosphorothioate linkage
  modified_base 3: mod_base = um
  modified_base 3^4: mod_base = OTHER; note = phosphorothioate linkage
  modified_base 4: mod_base = OTHER; note = 2'-fluoroguanosine
  modified_base 5: mod_base = OTHER; note = 2'-O-methyladenosine
  modified_base 6: mod_base = OTHER; note = 2'-fluoroadenosine
  modified_base 7: mod_base = gm
  modified_base 8: mod_base = OTHER; note = 2'-fluoroadenosine
  modified_base 9: mod_base = um
  modified_base 10: mod_base = OTHER; note = 2'-fluorouridine
  modified_base 11: mod_base = gm
  modified_base 12: mod_base = OTHER; note = 2'-fluorocytidine
  modified_base 13: mod_base = cm
  modified_base 14: mod_base = OTHER; note = 2'-fluoroadenosine
  modified_base 15: mod_base = um
  modified_base 16: mod_base = OTHER; note = 2'-fluorouridine
  modified_base 17: mod_base = OTHER; note = 2'-O-methyladenosine
  modified_base 18: mod_base = OTHER; note = 2'-fluoroadenosine
  modified_base 19: mod_base = um
  modified_base 20: mod_base = OTHER; note = 2'-fluoroguanosine
  modified_base 20^21: mod_base = OTHER; note = phosphorothioate linkage
  modified_base 21: mod_base = cm
  source 1..21: mol_type = other RNA
tatgaagattgccattaatgc

SEQ ID NO: 79 - RNA, 21 nt, synthetic construct
  modified_base 1: mod_base = OTHER; note = 2'-O-methyladenosine
  modified_base 1^2: mod_base = OTHER; note = phosphorothioate linkage
  modified_base 2: mod_base = OTHER; note = 2'-fluoroadenosine
  modified_base 2^3: mod_base = OTHER; note = phosphorothioate linkage
  modified_base 3: mod_base = OTHER; note = 2'-O-methyladenosine
  modified_base 3^4: mod_base = OTHER; note = phosphorothioate linkage
  modified_base 4: mod_base = OTHER; note = 2'-fluorocytidine
  modified_base 5: mod_base = gm
  modified_base 6: mod_base = OTHER; note = 2'-fluorouridine
  modified_base 7: mod_base = OTHER; note = 2'-O-methyladenosine
  modified_base 8: mod_base = OTHER; note = 2'-fluorouridine
  modified_base 9: mod_base = um
  modified_base 10: mod_base = OTHER; note = 2'-fluoroadenosine
  modified_base 11: mod_base = OTHER; note = 2'-O-methyladenosine
  modified_base 12: mod_base = OTHER; note = 2'-fluorocytidine
  modified_base 13: mod_base = gm
  modified_base 14: mod_base = OTHER; note = 2'-fluorouridine
  modified_base 15: mod_base = OTHER; note = 2'-O-methyladenosine
  modified_base 16: mod_base = OTHER; note = 2'-fluoroadenosine
  modified_base 17: mod_base = gm
  modified_base 18: mod_base = OTHER; note = 2'-fluorocytidine
  modified_base 19: mod_base = OTHER; note = 2'-O-methyladenosine
  modified_base 20: mod_base = OTHER; note = 2'-fluorouridine
  modified_base 20^21: mod_base = OTHER; note = phosphorothioate linkage
  modified_base 21: mod_base = cm
  source 1..21: mol_type = other RNA
aaacgtattaacgtaagcatc

SEQ ID NO: 80 - RNA, 21 nt, synthetic construct
  modified_base 1: mod_base = um
  modified_base 1^2: mod_base = OTHER; note = phosphorothioate linkage
  modified_base 2: mod_base = OTHER; note = 2'-fluorocytidine
  modified_base 2^3: mod_base = OTHER; note = phosphorothioate linkage
  modified_base 3: mod_base = um
  modified_base 3^4: mod_base = OTHER; note = phosphorothioate linkage
  modified_base 4: mod_base = OTHER; note = 2'-fluorouridine
  modified_base 5: mod_base = OTHER; note = 2'-O-methyladenosine
  modified_base 6: mod_base = OTHER; note = 2'-fluoroadenosine
  modified_base 7: mod_base = gm
  modified_base 8: mod_base = OTHER; note = 2'-fluoroadenosine
  modified_base 9: mod_base = um
  modified_base 10: mod_base = OTHER; note = 2'-fluorouridine
  modified_base 11: mod_base = gm
  modified_base 12: mod_base = OTHER; note = 2'-fluorouridine
  modified_base 13: mod_base = cm
  modified_base 14: mod_base = OTHER; note = 2'-fluoroadenosine
  modified_base 15: mod_base = OTHER; note = 2'-O-methyladenosine
  modified_base 16: mod_base = OTHER; note = 2'-fluoroadenosine
  modified_base 17: mod_base = gm
  modified_base 18: mod_base = OTHER; note = 2'-fluoroguanosine
  modified_base 19: mod_base = um
  modified_base 20: mod_base = OTHER; note = 2'-fluoroguanosine
  modified_base 20^21: mod_base = OTHER; note = phosphorothioate linkage
  modified_base 21: mod_base = cm
  source 1..21: mol_type = other RNA
tcttaagattgtcaaaggtgc

SEQ ID NO: 81 - RNA, 21 nt, synthetic construct
  modified_base 1: mod_base = um
  modified_base 1^2: mod_base = OTHER; note = phosphorothioate linkage
  modified_base 2: mod_base = OTHER; note = 2'-fluorouridine
  modified_base 2^3: mod_base = OTHER; note = phosphorothioate linkage
  modified_base 3: mod_base = gm
  modified_base 3^4: mod_base = OTHER; note = phosphorothioate linkage
  modified_base 4: mod_base = OTHER; note = 2'-fluoroadenosine
  modified_base 5: mod_base = um
  modified_base 6: mod_base = OTHER; note = 2'-fluorouridine
  modified_base 7: mod_base = OTHER; note = 2'-O-methyladenosine
  modified_base 8: mod_base = OTHER; note = 2'-fluorouridine
  modified_base 9: mod_base = cm
  modified_base 10: mod_base = OTHER; note = 2'-fluorouridine
  modified_base 11: mod_base = OTHER; note = 2'-O-methyladenosine
  modified_base 12: mod_base = OTHER; note = 2'-fluoroadenosine
  modified_base 13: mod_base = um
  modified_base 14: mod_base = OTHER; note = 2'-fluoroguanosine
  modified_base 15: mod_base = um
  modified_base 16: mod_base = OTHER; note = 2'-fluorocytidine
  modified_base 17: mod_base = OTHER; note = 2'-O-methyladenosine
  modified_base 18: mod_base = OTHER; note = 2'-fluoroguanosine
  modified_base 19: mod_base = um
  modified_base 20: mod_base = OTHER; note = 2'-fluoroadenosine
  modified_base 20^21: mod_base = OTHER; note = phosphorothioate linkage
  modified_base 21: mod_base = cm
  source 1..21: mol_type = other RNA
ttgattatctaatgtcagtac

SEQ ID NO: 82 - RNA, 21 nt, synthetic construct
  modified_base 1: mod_base = um
  modified_base 1^2: mod_base = OTHER; note = phosphorothioate linkage
  modified_base 2: mod_base = OTHER; note = 2'-fluorouridine
  modified_base 2^3: mod_base = OTHER; note = phosphorothioate linkage
  modified_base 3: mod_base = OTHER; note = 2'-O-methyladenosine
  modified_base 3^4: mod_base = OTHER; note = phosphorothioate linkage
  modified_base 4: mod_base = gm
  modified_base 5: mod_base = um
  modified_base 6: mod_base = OTHER; note = 2'-O-methyladenosine
  modified_base 7: mod_base = gm
  modified_base 8: mod_base = gm
  modified_base 9: mod_base = um
  modified_base 10: mod_base = OTHER; note = 2'-O-methyladenosine
  modified_base 11: mod_base = um
  modified_base 12: mod_base = OTHER; note = 2'-fluoroadenosine
  modified_base 13: mod_base = OTHER; note = 2'-O-methyladenosine
  modified_base 14: mod_base = OTHER; note = 2'-fluorocytidine
  modified_base 15: mod_base = cm
  modified_base 16: mod_base = OTHER; note = 2'-fluoroadenosine
  modified_base 17: mod_base = cm
  modified_base 18: mod_base = OTHER; note = 2'-O-methyladenosine
  modified_base 19: mod_base = gm
  modified_base 20: mod_base = cm
  modified_base 20^21: mod_base = OTHER; note = phosphorothioate linkage
  modified_base 21: mod_base = OTHER; note = 2'-O-methyladenosine
  source 1..21: mol_type = other RNA
ttagtaggtataaccacagca

SEQ ID NO: 83 - RNA, 21 nt, synthetic construct
  modified_base 1: mod_base = OTHER; note = 2'-O-methyladenosine
  modified_base 1^2: mod_base = OTHER; note = phosphorothioate linkage
  modified_base 2: mod_base = OTHER; note = 2'-fluoroadenosine
  modified_base 2^3: mod_base = OTHER; note = phosphorothioate linkage
  modified_base 3: mod_base = OTHER; note = 2'-O-methyladenosine
  modified_base 3^4: mod_base = OTHER; note = phosphorothioate linkage
  modified_base 4: mod_base = OTHER; note = 2'-fluoroguanosine
  modified_base 5: mod_base = OTHER; note = 2'-O-methyladenosine
  modified_base 6: mod_base = OTHER; note = 2'-O-methyladenosine
  modified_base 7: mod_base = gm
  modified_base 8: mod_base = um
  modified_base 9: mod_base = gm
  modified_base 10: mod_base = um
  modified_base 11: mod_base = cm
  modified_base 12: mod_base = OTHER; note = 2'-fluorouridine
  modified_base 13: mod_base = um
  modified_base 14: mod_base = OTHER; note = 2'-fluoroadenosine
  modified_base 15: mod_base = OTHER; note = 2'-O-methyladenosine
  modified_base 16: mod_base = OTHER; note = 2'-fluoroguanosine
  modified_base 17: mod_base = OTHER; note = 2'-O-methyladenosine
  modified_base 18: mod_base = um
  modified_base 19: mod_base = um
  modified_base 20: mod_base = gm
  modified_base 20^21: mod_base = OTHER; note = phosphorothioate linkage
  modified_base 21: mod_base = cm
  source 1..21: mol_type = other RNA
aaagaagtgtcttaagattgc

SEQ ID NO: 84 - RNA, 21 nt, synthetic construct
  modified_base 1: mod_base = um
  modified_base 1^2: mod_base = OTHER; note = phosphorothioate linkage
  modified_base 2: mod_base = OTHER; note = 2'-fluorocytidine
  modified_base 2^3: mod_base = OTHER; note = phosphorothioate linkage
  modified_base 3: mod_base = gm
  modified_base 3^4: mod_base = OTHER; note = phosphorothioate linkage
  modified_base 4: mod_base = um
  modified_base 5: mod_base = cm
  modified_base 6: mod_base = OTHER; note = 2'-O-methyladenosine
  modified_base 7: mod_base = OTHER; note = 2'-O-methyladenosine
  modified_base 8: mod_base = OTHER; note = 2'-fluorouridine
  modified_base 9: mod_base = OTHER; note = 2'-fluoroadenosine
  modified_base 10: mod_base = um
  modified_base 11: mod_base = gm
  modified_base 12: mod_base = OTHER; note = 2'-fluorocytidine
  modified_base 13: mod_base = um
  modified_base 14: mod_base = OTHER; note = 2'-fluorouridine
  modified_base 15: mod_base = OTHER; note = 2'-O-methyladenosine
  modified_base 16: mod_base = OTHER; note = 2'-fluorouridine
  modified_base 17: mod_base = um
  modified_base 18: mod_base = cm
  modified_base 19: mod_base = OTHER; note = 2'-O-methyladenosine
  modified_base 20: mod_base = gm
  modified_base 20^21: mod_base = OTHER; note = phosphorothioate linkage
  modified_base 21: mod_base = cm
  source 1..21: mol_type = other RNA
tcgtcaatatgcttattcagc

SEQ ID NO: 85 - RNA, 21 nt, synthetic construct
  modified_base 1: mod_base = um
  modified_base 1^2: mod_base = OTHER; note = phosphorothioate linkage
  modified_base 2: mod_base = OTHER; note = 2'-fluorouridine
  modified_base 2^3: mod_base = OTHER; note = phosphorothioate linkage
  modified_base 3: mod_base = cm
  modified_base 3^4: mod_base = OTHER; note = phosphorothioate linkage
  modified_base 4: mod_base = OTHER; note = 2'-fluoroadenosine
  modified_base 5: mod_base = um
  modified_base 6: mod_base = OTHER; note = 2'-fluoroadenosine
  modified_base 7: mod_base = OTHER; note = 2'-O-methyladenosine
  modified_base 8: mod_base = OTHER; note = 2'-fluoroguanosine
  modified_base 9: mod_base = cm
  modified_base 10: mod_base = OTHER; note = 2'-fluoroadenosine
  modified_base 11: mod_base = cm
  modified_base 12: mod_base = OTHER; note = 2'-fluorouridine
  modified_base 13: mod_base = cm
  modified_base 14: mod_base = OTHER; note = 2'-fluorouridine
  modified_base 15: mod_base = um
  modified_base 16: mod_base = OTHER; note = 2'-fluoroadenosine
  modified_base 17: mod_base = OTHER; note = 2'-O-methyladenosine
  modified_base 18: mod_base = OTHER; note = 2'-fluoroguanosine
  modified_base 19: mod_base = OTHER; note = 2'-O-methyladenosine
  modified_base 20: mod_base = OTHER; note = 2'-fluoroadenosine
  modified_base 20^21: mod_base = OTHER; note = phosphorothioate linkage
  modified_base 21: mod_base = gm
  source 1..21: mol_type = other RNA
ttcataagcactcttaagaag

SEQ ID NO: 86 - RNA, 21 nt, synthetic construct
  modified_base 1: mod_base = OTHER; note = 5'-cyclopropyl phosphonate-2'-O-methyluridine
  modified_base 1^2: mod_base = OTHER; note = phosphorothioate linkage
  modified_base 2: mod_base = OTHER; note = 2'-fluorocytidine
  modified_base 2^3: mod_base = OTHER; note = phosphorothioate linkage
  modified_base 3: mod_base = um
  modified_base 3^4: mod_base = OTHER; note = phosphorothioate linkage
  modified_base 4: mod_base = OTHER; note = 2'-fluorouridine
  modified_base 5: mod_base = OTHER; note = 2'-O-methyladenosine
  modified_base 6: mod_base = OTHER; note = 2'-fluoroadenosine
  modified_base 7: mod_base = gm
  modified_base 8: mod_base = OTHER; note = 2'-fluoroadenosine
  modified_base 9: mod_base = um
  modified_base 10: mod_base = OTHER; note = 2'-fluorouridine
  modified_base 11: mod_base = gm
  modified_base 12: mod_base = OTHER; note = 2'-fluorouridine
  modified_base 13: mod_base = cm
  modified_base 14: mod_base = OTHER; note = 2'-fluoroadenosine
  modified_base 15: mod_base = OTHER; note = 2'-O-methyladenosine
  modified_base 16: mod_base = OTHER; note = 2'-fluoroadenosine
  modified_base 17: mod_base = gm
  modified_base 18: mod_base = OTHER; note = 2'-fluoroguanosine
  modified_base 19: mod_base = um
  modified_base 20: mod_base = OTHER; note = 2'-fluoroguanosine
  modified_base 20^21: mod_base = OTHER; note = phosphorothioate linkage
  modified_base 21: mod_base = cm
  source 1..21: mol_type = other RNA
tcttaagattgtcaaaggtgc

SEQ ID NO: 87 - RNA, 21 nt, synthetic construct
  modified_base 1: mod_base = OTHER; note = 5'-cyclopropyl phosphonate-2'-O-methyluridine
  modified_base 1^2: mod_base = OTHER; note = phosphorothioate linkage
  modified_base 2: mod_base = OTHER; note = 2'-fluorouridine
  modified_base 2^3: mod_base = OTHER; note = phosphorothioate linkage
  modified_base 3: mod_base = OTHER; note = 2'-O-methyladenosine
  modified_base 3^4: mod_base = OTHER; note = phosphorothioate linkage
  modified_base 4: mod_base = OTHER; note = 2'-fluoroguanosine
  modified_base 5: mod_base = gm
  modified_base 6: mod_base = OTHER; note = 2'-fluoroadenosine
  modified_base 7: mod_base = um
  modified_base 8: mod_base = OTHER; note = 2'-fluorouridine
  modified_base 9: mod_base = um
  modified_base 10: mod_base = OTHER; note = 2'-fluorouridine
  modified_base 11: mod_base = cm
  modified_base 12: mod_base = OTHER; note = 2'-fluorocytidine
  modified_base 13: mod_base = OTHER; note = 2'-O-methyladenosine
  modified_base 14: mod_base = OTHER; note = 2'-fluorocytidine
  modified_base 15: mod_base = um
  modified_base 16: mod_base = OTHER; note = 2'-fluoroadenosine
  modified_base 17: mod_base = cm
  modified_base 18: mod_base = OTHER; note = 2'-fluorouridine
  modified_base 19: mod_base = um
  modified_base 20: mod_base = OTHER; note = 2'-fluorocytidine
  modified_base 20^21: mod_base = OTHER; note = phosphorothioate linkage
  modified_base 21: mod_base = cm
  source 1..21: mol_type = other RNA
ttaggattttccactacttcc

SEQ ID NO: 88 - RNA, 21 nt, synthetic construct
  modified_base 1: mod_base = OTHER; note = 5'-cyclopropyl phosphonate-2'-O-methyluridine
  modified_base 1^2: mod_base = OTHER; note = phosphorothioate linkage
  modified_base 2: mod_base = OTHER; note = 2'-fluorouridine
  modified_base 2^3: mod_base = OTHER; note = phosphorothioate linkage
  modified_base 3: mod_base = OTHER; note = 2'-O-methyladenosine
  modified_base 3^4: mod_base = OTHER; note = phosphorothioate linkage
  modified_base 4: mod_base = OTHER; note = 2'-fluoroguanosine
  modified_base 5: mod_base = OTHER; note = 2'-O-methyladenosine
  modified_base 6: mod_base = OTHER; note = 2'-fluorouridine
  modified_base 7: mod_base = OTHER; note = 2'-O-methyladenosine
  modified_base 8: mod_base = OTHER; note = 2'-fluoroadenosine
  modified_base 9: mod_base = gm
  modified_base 10: mod_base = OTHER; note = 2'-fluoroadenosine
  modified_base 11: mod_base = cm
  modified_base 12: mod_base = OTHER; note = 2'-fluoroadenosine
  modified_base 13: mod_base = um
  modified_base 14: mod_base = OTHER; note = 2'-fluorouridine
  modified_base 15: mod_base = gm
  modified_base 16: mod_base = OTHER; note = 2'-fluorouridine
  modified_base 17: mod_base = cm
  modified_base 18: mod_base = OTHER; note = 2'-fluorouridine
  modified_base 19: mod_base = OTHER; note = 2'-O-methyladenosine
  modified_base 20: mod_base = OTHER; note = 2'-fluoroadenosine
  modified_base 20^21: mod_base = OTHER; note = phosphorothioate linkage
  modified_base 21: mod_base = gm
  source 1..21: mol_type = other RNA
ttagataagacattgtctaag

SEQ ID NO: 89 - RNA, 21 nt, synthetic construct
  modified_base 1: mod_base = OTHER; note = 5'-cyclopropyl phosphonate-2'-O-methyluridine
  modified_base 1^2: mod_base = OTHER; note = phosphorothioate linkage
  modified_base 2: mod_base = OTHER; note = 2'-fluoroguanosine
  modified_base 2^3: mod_base = OTHER; note = phosphorothioate linkage
  modified_base 3: mod_base = um
  modified_base 3^4: mod_base = OTHER; note = phosphorothioate linkage
  modified_base 4: mod_base = OTHER; note = 2'-fluoroadenosine
  modified_base 5: mod_base = gm
  modified_base 6: mod_base = OTHER; note = 2'-fluorouridine
  modified_base 7: mod_base = OTHER; note = 2'-O-methyladenosine
  modified_base 8: mod_base = OTHER; note = 2'-fluoroguanosine
  modified_base 9: mod_base = OTHER; note = 2'-O-methyladenosine
  modified_base 10: mod_base = OTHER; note = 2'-fluoroadenosine
  modified_base 11: mod_base = OTHER; note = 2'-O-methyladenosine
  modified_base 12: mod_base = OTHER; note = 2'-fluorouridine
  modified_base 13: mod_base = OTHER; note = 2'-O-methyladenosine
  modified_base 14: mod_base = OTHER; note = 2'-fluorocytidine
  modified_base 15: mod_base = cm
  modified_base 16: mod_base = OTHER; note = 2'-fluoroadenosine
  modified_base 17: mod_base = um
  modified_base 18: mod_base = OTHER; note = 2'-fluorocytidine
  modified_base 19: mod_base = um
  modified_base 20: mod_base = OTHER; note = 2'-fluorouridine
  modified_base 20^21: mod_base = OTHER; note = phosphorothioate linkage
  modified_base 21: mod_base = gm
  source 1..21: mol_type = other RNA
tgtagtagaaataccatcttg

SEQ ID NO: 90 - RNA, 21 nt, synthetic construct
  modified_base 1: mod_base = OTHER; note = 5'-cyclopropyl phosphonate-2'-O-methyluridine
  modified_base 1^2: mod_base = OTHER; note = phosphorothioate linkage
  modified_base 2: mod_base = OTHER; note = 2'-fluorouridine
  modified_base 2^3: mod_base = OTHER; note = phosphorothioate linkage
  modified_base 3: mod_base = um
  modified_base 3^4: mod_base = OTHER; note = phosphorothioate linkage
  modified_base 4: mod_base = OTHER; note = 2'-fluoroguanosine
  modified_base 5: mod_base = um
  modified_base 6: mod_base = OTHER; note = 2'-fluoroadenosine
  modified_base 7: mod_base = OTHER; note = 2'-O-methyladenosine
  modified_base 8: mod_base = OTHER; note = 2'-fluorouridine
  modified_base 9: mod_base = cm
  modified_base 10: mod_base = OTHER; note = 2'-fluoroadenosine
  modified_base 11: mod_base = gm
  modified_base 12: mod_base = OTHER; note = 2'-fluorouridine
  modified_base 13: mod_base = um
  modified_base 14: mod_base = OTHER; note = 2'-fluorocytidine
  modified_base 15: mod_base = cm
  modified_base 16: mod_base = OTHER; note = 2'-fluorouridine
  modified_base 17: mod_base = um
  modified_base 18: mod_base = OTHER; note = 2'-fluoroguanosine
  modified_base 19: mod_base = um
  modified_base 20: mod_base = OTHER; note = 2'-fluorocytidine
  modified_base 20^21: mod_base = OTHER; note = phosphorothioate linkage
  modified_base 21: mod_base = cm
  source 1..21: mol_type = other RNA
tttgtaatcagttccttgtcc

SEQ ID NO: 91 - RNA, 21 nt, synthetic construct
  modified_base 1: mod_base = OTHER; note = 5'-cyclopropyl phosphonate-2'-O-methyluridine
  modified_base 1^2: mod_base = OTHER; note = phosphorothioate linkage
  modified_base 2: mod_base = OTHER; note = 2'-fluorouridine
  modified_base 2^3: mod_base = OTHER; note = phosphorothioate linkage
  modified_base 3: mod_base = OTHER; note = 2'-O-methyladenosine
  modified_base 3^4: mod_base = OTHER; note = phosphorothioate linkage
  modified_base 4: mod_base = OTHER; note = 2'-fluorocytidine
  modified_base 5: mod_base = OTHER; note = 2'-O-methyladenosine
  modified_base 6: mod_base = OTHER; note = 2'-fluorouridine
  modified_base 7: mod_base = um
  modified_base 8: mod_base = OTHER; note = 2'-fluoroguanosine
  modified_base 9: mod_base = um
  modified_base 10: mod_base = OTHER; note = 2'-fluoroadenosine
  modified_base 11: mod_base = um
  modified_base 12: mod_base = OTHER; note = 2'-fluoroguanosine
  modified_base 13: mod_base = cm
  modified_base 14: mod_base = OTHER; note = 2'-fluorouridine
  modified_base 15: mod_base = um
  modified_base 16: mod_base = OTHER; note = 2'-fluorouridine
  modified_base 17: mod_base = OTHER; note = 2'-O-methyladenosine
  modified_base 18: mod_base = OTHER; note = 2'-fluoroguanosine
  modified_base 19: mod_base = um
  modified_base 20: mod_base = OTHER; note = 2'-fluoroguanosine
  modified_base 20^21: mod_base = OTHER; note = phosphorothioate linkage
  modified_base 21: mod_base = gm
  source 1..21: mol_type = other RNA
ttacattgtatgctttagtgg

SEQ ID NO: 92 - RNA, 21 nt, synthetic construct
  modified_base 1: mod_base = OTHER; note = 5'-cyclopropyl phosphonate-2'-O-methyluridine
  modified_base 1^2: mod_base = OTHER; note = phosphorothioate linkage
  modified_base 2: mod_base = OTHER; note = 2'-fluorouridine
  modified_base 2^3: mod_base = OTHER; note = phosphorothioate linkage
  modified_base 3: mod_base = gm
  modified_base 3^4: mod_base = OTHER; note = phosphorothioate linkage
  modified_base 4: mod_base = OTHER; note = 2'-fluorouridine
  modified_base 5: mod_base = um
  modified_base 6: mod_base = OTHER; note = 2'-fluorouridine
  modified_base 7: mod_base = OTHER; note = 2'-O-methyladenosine
  modified_base 8: mod_base = OTHER; note = 2'-fluoroadenosine
  modified_base 9: mod_base = cm
  modified_base 10: mod_base = OTHER; note = 2'-fluorouridine
  modified_base 11: mod_base = OTHER; note = 2'-O-methyladenosine
  modified_base 12: mod_base = OTHER; note = 2'-fluoroguanosine
  modified_base 13: mod_base = cm
  modified_base 14: mod_base = OTHER; note = 2'-fluoroadenosine
  modified_base 15: mod_base = um
  modified_base 16: mod_base = OTHER; note = 2'-fluorouridine
  modified_base 17: mod_base = gm
  modified_base 18: mod_base = OTHER; note = 2'-fluorouridine
  modified_base 19: mod_base = OTHER; note = 2'-O-methyladenosine
  modified_base 20: mod_base = OTHER; note = 2'-fluorouridine
  modified_base 20^21: mod_base = OTHER; note = phosphorothioate linkage
  modified_base 21: mod_base = gm
  source 1..21: mol_type = other RNA
ttgtttaactagcattgtatg

SEQ ID NO: 93 - RNA, 21 nt, synthetic construct
  modified_base 1: mod_base = OTHER; note = 5'-cyclopropyl phosphonate-2'-O-methyladenosine
  modified_base 1^2: mod_base = OTHER; note = phosphorothioate linkage
  modified_base 2: mod_base = OTHER; note = 2'-fluoroguanosine
  modified_base 2^3: mod_base = OTHER; note = phosphorothioate linkage
  modified_base 3: mod_base = um
  modified_base 3^4: mod_base = OTHER; note = phosphorothioate linkage
  modified_base 4: mod_base = OTHER; note = 2'-fluoroadenosine
  modified_base 5: mod_base = gm
  modified_base 6: mod_base = OTHER; note = 2'-fluoroadenosine
  modified_base 7: mod_base = OTHER; note = 2'-O-methyladenosine
  modified_base 8: mod_base = OTHER; note = 2'-fluoroadenosine
  modified_base 9: mod_base = um
  modified_base 10: mod_base = OTHER; note = 2'-fluoroadenosine
  modified_base 11: mod_base = cm
  modified_base 12: mod_base = OTHER; note = 2'-fluorocytidine
  modified_base 13: mod_base = OTHER; note = 2'-O-methyladenosine
  modified_base 14: mod_base = OTHER; note = 2'-fluorouridine
  modified_base 15: mod_base = cm
  modified_base 16: mod_base = OTHER; note = 2'-fluorouridine
  modified_base 17: mod_base = um
  modified_base 18: mod_base = OTHER; note = 2'-fluoroguanosine
  modified_base 19: mod_base = gm
  modified_base 20: mod_base = OTHER; note = 2'-fluoroadenosine
  modified_base 20^21: mod_base = OTHER; note = phosphorothioate linkage
  modified_base 21: mod_base = cm
  source 1..21: mol_type = other RNA
agtagaaataccatcttggac

SEQ ID NO: 94 - RNA, 21 nt, synthetic construct
  modified_base 1: mod_base = OTHER; note = 5'-cyclopropyl phosphonate-2'-O-methyluridine
  modified_base 1^2: mod_base = OTHER; note = phosphorothioate linkage
  modified_base 2: mod_base = OTHER; note = 2'-fluoroguanosine
  modified_base 2^3: mod_base = OTHER; note = phosphorothioate linkage
  modified_base 3: mod_base = um
  modified_base 3^4: mod_base = OTHER; note = phosphorothioate linkage
  modified_base 4: mod_base = OTHER; note = 2'-fluoroadenosine
  modified_base 5: mod_base = gm
  modified_base 6: mod_base = OTHER; note = 2'-fluoroadenosine
  modified_base 7: mod_base = OTHER; note = 2'-O-methyladenosine
  modified_base 8: mod_base = OTHER; note = 2'-fluoroadenosine
  modified_base 9: mod_base = um
  modified_base 10: mod_base = OTHER; note = 2'-fluoroadenosine
  modified_base 11: mod_base = cm
  modified_base 12: mod_base = OTHER; note = 2'-fluorocytidine
  modified_base 13: mod_base = OTHER; note = 2'-O-methyladenosine
  modified_base 14: mod_base = OTHER; note = 2'-fluorouridine
  modified_base 15: mod_base = cm
  modified_base 16: mod_base = OTHER; note = 2'-fluorouridine
  modified_base 17: mod_base = um
  modified_base 18: mod_base = OTHER; note = 2'-fluoroguanosine
  modified_base 19: mod_base = gm
  modified_base 20: mod_base = OTHER; note = 2'-fluoroadenosine
  modified_base 20^21: mod_base = OTHER; note = phosphorothioate linkage
  modified_base 21: mod_base = cm
  source 1..21: mol_type = other RNA
tgtagaaataccatcttggac

SEQ ID NO: 95 - RNA, 21 nt, synthetic construct
  modified_base 1: mod_base = OTHER; note = 5'-cyclopropyl phosphonate-2'-O-methyluridine
  modified_base 1^2: mod_base = OTHER; note = phosphorothioate linkage
  modified_base 2: mod_base = OTHER; note = 2'-fluorouridine
  modified_base 2^3: mod_base = OTHER; note = phosphorothioate linkage
  modified_base 3: mod_base = OTHER; note = 2'-O-methyladenosine
  modified_base 4: mod_base = OTHER; note = 2'-fluoroguanosine
  modified_base 5: mod_base = gm
  modified_base 6: mod_base = OTHER; note = 2'-O-methyladenosine
  modified_base 7: mod_base = um
  modified_base 8: mod_base = um
  modified_base 9: mod_base = um
  modified_base 10: mod_base = um
  modified_base 11: mod_base = cm
  modified_base 12: mod_base = OTHER; note = 2'-fluorocytidine
  modified_base 13: mod_base = OTHER; note = 2'-O-methyladenosine
  modified_base 14: mod_base = OTHER; note = 2'-fluorocytidine
  modified_base 15: mod_base = um
  modified_base 16: mod_base = OTHER; note = 2'-fluoroadenosine
  modified_base 17: mod_base = cm
  modified_base 18: mod_base = um
  modified_base 19: mod_base = um
  modified_base 19^20: mod_base = OTHER; note = phosphorothioate linkage
  modified_base 20: mod_base = cm
  modified_base 20^21: mod_base = OTHER; note = phosphorothioate linkage
  modified_base 21: mod_base = cm
  source 1..21: mol_type = other RNA
ttaggattttccactacttcc

SEQ ID NO: 96 - RNA, 21 nt, synthetic construct
  modified_base 1: mod_base = OTHER; note = 5'-cyclopropyl phosphonate-2'-O-methyluridine
  modified_base 1^2: mod_base = OTHER; note = phosphorothioate linkage
  modified_base 2: mod_base = OTHER; note = 2'-fluorouridine
  modified_base 2^3: mod_base = OTHER; note = phosphorothioate linkage
  modified_base 3: mod_base = OTHER; note = 2'-O-methyladenosine
  modified_base 4: mod_base = gm
  modified_base 5: mod_base = gm
  modified_base 6: mod_base = OTHER; note = 2'-O-methyladenosine
  modified_base 7: mod_base = OTHER; note = 2'-fluorouridine
  modified_base 8: mod_base = um
  modified_base 9: mod_base = um
  modified_base 10: mod_base = um
  modified_base 11: mod_base = cm
  modified_base 12: mod_base = OTHER; note = 2'-fluorocytidine
  modified_base 13: mod_base = OTHER; note = 2'-O-methyladenosine
  modified_base 14: mod_base = OTHER; note = 2'-fluorocytidine
  modified_base 15: mod_base = um
  modified_base 16: mod_base = OTHER; note = 2'-fluoroadenosine
  modified_base 17: mod_base = cm
  modified_base 18: mod_base = um
  modified_base 19: mod_base = um
  modified_base 19^20: mod_base = OTHER; note = phosphorothioate linkage
  modified_base 20: mod_base = cm
  modified_base 20^21: mod_base = OTHER; note = phosphorothioate linkage
  modified_base 21: mod_base = cm
  source 1..21: mol_type = other RNA
ttaggattttccactacttcc

SEQ ID NO: 97 - RNA, 21 nt, synthetic construct
  modified_base 1: mod_base = OTHER; note = 5'-cyclopropyl phosphonate-2'-O-methyluridine
  modified_base 1^2: mod_base = OTHER; note = phosphorothioate linkage
  modified_base 2: mod_base = OTHER; note = 2'-fluorouridine
  modified_base 2^3: mod_base = OTHER; note = phosphorothioate linkage
  modified_base 3: mod_base = OTHER; note = 2'-O-methyladenosine
  modified_base 4: mod_base = gm
  modified_base 5: mod_base = gm
  modified_base 6: mod_base = OTHER; note = 2'-O-methyladenosine
  modified_base 7: mod_base = um
  modified_base 8: mod_base = um
  modified_base 9: mod_base = OTHER; note = 2'-fluorouridine
  modified_base 10: mod_base = um
  modified_base 11: mod_base = cm
  modified_base 12: mod_base = OTHER; note = 2'-fluorocytidine
  modified_base 13: mod_base = OTHER; note = 2'-O-methyladenosine
  modified_base 14: mod_base = OTHER; note = 2'-fluorocytidine
  modified_base 15: mod_base = um
  modified_base 16: mod_base = OTHER; note = 2'-fluoroadenosine
  modified_base 17: mod_base = cm
  modified_base 18: mod_base = um
  modified_base 19: mod_base = um
  modified_base 19^20: mod_base = OTHER; note = phosphorothioate linkage
  modified_base 20: mod_base = cm
  modified_base 20^21: mod_base = OTHER; note = phosphorothioate linkage
  modified_base 21: mod_base = cm
  source 1..21: mol_type = other RNA
ttaggattttccactacttcc

SEQ ID NO: 98 - RNA, 21 nt, synthetic construct
  modified_base 1: mod_base = OTHER; note = 5'-cyclopropyl phosphonate-2'-O-methyluridine
  modified_base 1^2: mod_base = OTHER; note = phosphorothioate linkage
  modified_base 2: mod_base = OTHER; note = 2'-fluorouridine
  modified_base 2^3: mod_base = OTHER; note = phosphorothioate linkage
  modified_base 3: mod_base = OTHER; note = 2'-O-methyladenosine
  modified_base 4: mod_base = gm
  modified_base 5: mod_base = gm
  modified_base 6: mod_base = OTHER; note = 2'-O-methyladenosine
  modified_base 7: mod_base = um
  modified_base 8: mod_base = um
  modified_base 9: mod_base = OTHER; note = 2'-fluorouridine
  modified_base 10: mod_base = um
  modified_base 11: mod_base = cm
  modified_base 12: mod_base = OTHER; note = 2'-fluorocytidine
  modified_base 13: mod_base = OTHER; note = 2'-O-methyladenosine
  modified_base 14: mod_base = OTHER; note = 2'-fluorocytidine
  modified_base 15: mod_base = um
  modified_base 16: mod_base = OTHER; note = 2'-fluoroadenosine
  modified_base 17: mod_base = cm
  modified_base 18: mod_base = um
  modified_base 19: mod_base = um
  modified_base 19^20: mod_base = OTHER; note = phosphorothioate linkage
  modified_base 20: mod_base = cm
  modified_base 20^21: mod_base = OTHER; note = phosphorothioate linkage
  modified_base 21: mod_base = gm
  source 1..21: mol_type = other RNA
ttaggattttccactacttcg

SEQ ID NO: 99 - RNA, 21 nt, synthetic construct
  modified_base 1: mod_base = OTHER; note = 5'-cyclopropyl phosphonate-2'-O-methyluridine
  modified_base 2: mod_base = OTHER; note = 2'-fluorouridine
  modified_base 3: mod_base = OTHER; note = 2'-O-methyladenosine
  modified_base 4: mod_base = gm
  modified_base 5: mod_base = gm
  modified_base 6: mod_base = OTHER; note = 2'-O-methyladenosine
  modified_base 7: mod_base = um
  modified_base 8: mod_base = um
  modified_base 9: mod_base = OTHER; note = 2'-fluorouridine
  modified_base 10: mod_base = um
  modified_base 11: mod_base = cm
  modified_base 12: mod_base = OTHER; note = 2'-fluorocytidine
  modified_base 13: mod_base = OTHER; note = 2'-O-methyladenosine
  modified_base 14: mod_base = OTHER; note = 2'-fluorocytidine
  modified_base 15: mod_base = um
  modified_base 16: mod_base = OTHER; note = 2'-fluoroadenosine
  modified_base 17: mod_base = cm
  modified_base 18: mod_base = um
  modified_base 19: mod_base = um
  modified_base 19^20: mod_base = OTHER; note = phosphorothioate linkage
  modified_base 20: mod_base = cm
  modified_base 20^21: mod_base = OTHER; note = phosphorothioate linkage
  modified_base 21: mod_base = cm
  source 1..21: mol_type = other RNA
ttaggattttccactacttcc

SEQ ID NO: 100 - RNA, 21 nt, synthetic construct
  modified_base 1: mod_base = OTHER; note = 5'-cyclopropyl phosphonate-2'-O-methyluridine
  modified_base 1^2: mod_base = OTHER; note = phosphorothioate linkage
  modified_base 2: mod_base = OTHER; note = 2'-fluorouridine
  modified_base 2^3: mod_base = OTHER; note = phosphorothioate linkage
  modified_base 3: mod_base = gm
  modified_base 4: mod_base = OTHER; note = 2'-fluorouridine
  modified_base 5: mod_base = um
  modified_base 6: mod_base = um
  modified_base 7: mod_base = OTHER; note = 2'-O-methyladenosine
  modified_base 8: mod_base = OTHER; note = 2'-O-methyladenosine
  modified_base 9: mod_base = cm
  modified_base 10: mod_base = um
  modified_base 11: mod_base = OTHER; note = 2'-O-methyladenosine
  modified_base 12: mod_base = OTHER; note = 2'-fluoroguanosine
  modified_base 13: mod_base = cm
  modified_base 14: mod_base = OTHER; note = 2'-fluoroadenosine
  modified_base 15: mod_base = um
  modified_base 16: mod_base = OTHER; note = 2'-fluorouridine
  modified_base 17: mod_base = gm
  modified_base 18: mod_base = um
  modified_base 19: mod_base = OTHER; note = 2'-O-methyladenosine
  modified_base 19^20: mod_base = OTHER; note = phosphorothioate linkage
  modified_base 20: mod_base = um
  modified_base 20^21: mod_base = OTHER; note = phosphorothioate linkage
  modified_base 21: mod_base = gm
  source 1..21: mol_type = other RNA
ttgtttaactagcattgtatg

SEQ ID NO: 101 - RNA, 21 nt, synthetic construct
  modified_base 1: mod_base = OTHER; note = 5'-cyclopropyl phosphonate-2'-O-methyluridine
  modified_base 2: mod_base = OTHER; note = 2'-fluorouridine
  modified_base 3: mod_base = gm
  modified_base 4: mod_base = OTHER; note = 2'-fluorouridine
  modified_base 5: mod_base = um
  modified_base 6: mod_base = um
  modified_base 7: mod_base = OTHER; note = 2'-O-methyladenosine
  modified_base 8: mod_base = OTHER; note = 2'-O-methyladenosine
  modified_base 9: mod_base = cm
  modified_base 10: mod_base = um
  modified_base 11: mod_base = OTHER; note = 2'-O-methyladenosine
  modified_base 12: mod_base = OTHER; note = 2'-fluoroguanosine
  modified_base 13: mod_base = cm
  modified_base 14: mod_base = OTHER; note = 2'-fluoroadenosine
  modified_base 15: mod_base = um
  modified_base 16: mod_base = OTHER; note = 2'-fluorouridine
  modified_base 17: mod_base = gm
  modified_base 18: mod_base = um
  modified_base 19: mod_base = OTHER; note = 2'-O-methyladenosine
  modified_base 19^20: mod_base = OTHER; note = phosphorothioate linkage
  modified_base 20: mod_base = um
  modified_base 20^21: mod_base = OTHER; note = phosphorothioate linkage
  modified_base 21: mod_base = gm
  source 1..21: mol_type = other RNA
ttgtttaactagcattgtatg

SEQ ID NO: 102 - RNA, 21 nt, synthetic construct
  modified_base 1: mod_base = OTHER; note = 5'-cyclopropyl phosphonate-2'-O-methyluridine
  modified_base 1^2: mod_base = OTHER; note = phosphorothioate linkage
  modified_base 2: mod_base = OTHER; note = 2'-fluorouridine
  modified_base 2^3: mod_base = OTHER; note = phosphorothioate linkage
  modified_base 3: mod_base = gm
  modified_base 4: mod_base = OTHER; note = 2'-fluorouridine
  modified_base 5: mod_base = um
  modified_base 6: mod_base = um
  modified_base 7: mod_base = OTHER; note = 2'-O-methyladenosine
  modified_base 8: mod_base = OTHER; note = 2'-O-methyladenosine
  modified_base 9: mod_base = cm
  modified_base 10: mod_base = um
  modified_base 11: mod_base = OTHER; note = 2'-O-methyladenosine
  modified_base 12: mod_base = OTHER; note = 2'-fluoroguanosine
  modified_base 13: mod_base = cm
  modified_base 14: mod_base = OTHER; note = 2'-fluoroadenosine
  modified_base 15: mod_base = um
  modified_base 16: mod_base = OTHER; note = 2'-fluorouridine
  modified_base 17: mod_base = gm
  modified_base 18: mod_base = um
  modified_base 19: mod_base = OTHER; note = 2'-O-methyladenosine
  modified_base 19^20: mod_base = OTHER; note = phosphorothioate linkage
  modified_base 20: mod_base = cm
  modified_base 20^21: mod_base = OTHER; note = phosphorothioate linkage
  modified_base 21: mod_base = gm
  source 1..21: mol_type = other RNA
ttgtttaactagcattgtacg

SEQ ID NO: 103 - RNA, 21 nt, synthetic construct
  modified_base 1: mod_base = OTHER; note = 5'-cyclopropyl phosphonate-2'-O-methyluridine
  modified_base 1^2: mod_base = OTHER; note = phosphorothioate linkage
  modified_base 2: mod_base = OTHER; note = 2'-fluorouridine
  modified_base 2^3: mod_base = OTHER; note = phosphorothioate linkage
  modified_base 3: mod_base = gm
  modified_base 4: mod_base = um
  modified_base 5: mod_base = um
  modified_base 6: mod_base = um
  modified_base 7: mod_base = OTHER; note = 2'-fluoroadenosine
  modified_base 8: mod_base = OTHER; note = 2'-O-methyladenosine
  modified_base 9: mod_base = cm
  modified_base 10: mod_base = um
  modified_base 11: mod_base = OTHER; note = 2'-O-methyladenosine
  modified_base 12: mod_base = OTHER; note = 2'-fluoroguanosine
  modified_base 13: mod_base = cm
  modified_base 14: mod_base = OTHER; note = 2'-fluoroadenosine
  modified_base 15: mod_base = um
  modified_base 16: mod_base = OTHER; note = 2'-fluorouridine
  modified_base 17: mod_base = gm
  modified_base 18: mod_base = um
  modified_base 19: mod_base = OTHER; note = 2'-O-methyladenosine
  modified_base 19^20: mod_base = OTHER; note = phosphorothioate linkage
  modified_base 20: mod_base = um
  modified_base 20^21: mod_base = OTHER; note = phosphorothioate linkage
  modified_base 21: mod_base = gm
  source 1..21: mol_type = other RNA
ttgtttaactagcattgtatg

SEQ ID NO: 104 - RNA, 21 nt, synthetic construct
  modified_base 1: mod_base = OTHER; note = 5'-cyclopropyl phosphonate-2'-O-methyladenosine
  modified_base 1^2: mod_base = OTHER; note = phosphorothioate linkage
  modified_base 2: mod_base = OTHER; note = 2'-fluoroguanosine
  modified_base 2^3: mod_base = OTHER; note = phosphorothioate linkage
  modified_base 3: mod_base = um
  modified_base 4: mod_base = OTHER; note = 2'-fluoroadenosine
  modified_base 5: mod_base = gm
  modified_base 6: mod_base = OTHER; note = 2'-O-methyladenosine
  modified_base 7: mod_base = OTHER; note = 2'-O-methyladenosine
  modified_base 8: mod_base = OTHER; note = 2'-O-methyladenosine
  modified_base 9: mod_base = um
  modified_base 10: mod_base = OTHER; note = 2'-O-methyladenosine
  modified_base 11: mod_base = cm
  modified_base 12: mod_base = OTHER; note = 2'-fluorocytidine
  modified_base 13: mod_base = OTHER; note = 2'-O-methyladenosine
  modified_base 14: mod_base = OTHER; note = 2'-fluorouridine
  modified_base 15: mod_base = cm
  modified_base 16: mod_base = OTHER; note = 2'-fluorouridine
  modified_base 17: mod_base = um
  modified_base 18: mod_base = gm
  modified_base 19: mod_base = gm
  modified_base 19^20: mod_base = OTHER; note = phosphorothioate linkage
  modified_base 20: mod_base = OTHER; note = 2'-O-methyladenosine
  modified_base 20^21: mod_base = OTHER; note = phosphorothioate linkage
  modified_base 21: mod_base = cm
  source 1..21: mol_type = other RNA
agtagaaataccatcttggac

SEQ ID NO: 105 - RNA, 21 nt, synthetic construct
  modified_base 1: mod_base = OTHER; note = 5'-cyclopropyl phosphonate-2'-O-methyladenosine
  modified_base 1^2: mod_base = OTHER; note = phosphorothioate linkage
  modified_base 2: mod_base = OTHER; note = 2'-fluoroguanosine
  modified_base 2^3: mod_base = OTHER; note = phosphorothioate linkage
  modified_base 3: mod_base = um
  modified_base 4: mod_base = OTHER; note = 2'-O-methyladenosine
  modified_base 5: mod_base = gm
  modified_base 6: mod_base = OTHER; note = 2'-O-methyladenosine
  modified_base 7: mod_base = OTHER; note = 2'-fluoroadenosine
  modified_base 8: mod_base = OTHER; note = 2'-O-methyladenosine
  modified_base 9: mod_base = um
  modified_base 10: mod_base = OTHER; note = 2'-O-methyladenosine
  modified_base 11: mod_base = cm
  modified_base 12: mod_base = OTHER; note = 2'-fluorocytidine
  modified_base 13: mod_base = OTHER; note = 2'-O-methyladenosine
  modified_base 14: mod_base = OTHER; note = 2'-fluorouridine
  modified_base 15: mod_base = cm
  modified_base 16: mod_base = OTHER; note = 2'-fluorouridine
  modified_base 17: mod_base = um
  modified_base 18: mod_base = gm
  modified_base 19: mod_base = gm
  modified_base 19^20: mod_base = OTHER; note = phosphorothioate linkage
  modified_base 20: mod_base = OTHER; note = 2'-O-methyladenosine
  modified_base 20^21: mod_base = OTHER; note = phosphorothioate linkage
  modified_base 21: mod_base = cm
  source 1..21: mol_type = other RNA
agtagaaataccatcttggac

SEQ ID NO: 106 - RNA, 21 nt, synthetic construct
  modified_base 1: mod_base = OTHER; note = 5'-cyclopropyl phosphonate-2'-O-methyladenosine
  modified_base 1^2: mod_base = OTHER; note = phosphorothioate linkage
  modified_base 2: mod_base = OTHER; note = 2'-fluoroguanosine
  modified_base 2^3: mod_base = OTHER; note = phosphorothioate linkage
  modified_base 3: mod_base = um
  modified_base 4: mod_base = OTHER; note = 2'-O-methyladenosine
  modified_base 5: mod_base = gm
  modified_base 6: mod_base = OTHER; note = 2'-O-methyladenosine
  modified_base 7: mod_base = OTHER; note = 2'-O-methyladenosine
  modified_base 8: mod_base = OTHER; note = 2'-O-methyladenosine
  modified_base 9: mod_base = OTHER; note = 2'-fluorouridine
  modified_base 10: mod_base = OTHER; note = 2'-O-methyladenosine
  modified_base 11: mod_base = cm
  modified_base 12: mod_base = OTHER; note = 2'-fluorocytidine
  modified_base 13: mod_base = OTHER; note = 2'-O-methyladenosine
  modified_base 14: mod_base = OTHER; note = 2'-fluorouridine
  modified_base 15: mod_base = cm
  modified_base 16: mod_base = OTHER; note = 2'-fluorouridine
  modified_base 17: mod_base = um
  modified_base 18: mod_base = gm
  modified_base 19: mod_base = gm
  modified_base 19^20: mod_base = OTHER; note = phosphorothioate linkage
  modified_base 20: mod_base = OTHER; note = 2'-O-methyladenosine
  modified_base 20^21: mod_base = OTHER; note = phosphorothioate linkage
  modified_base 21: mod_base = cm
  source 1..21: mol_type = other RNA
agtagaaataccatcttggac

SEQ ID NO: 107 - RNA, 21 nt, synthetic construct
  modified_base 1: mod_base = OTHER; note = 5'-cyclopropyl phosphonate-2'-O-methyladenosine
  modified_base 2: mod_base = OTHER; note = 2'-fluoroguanosine
  modified_base 3: mod_base = um
  modified_base 4: mod_base = OTHER; note = 2'-O-methyladenosine
  modified_base 5: mod_base = gm
  modified_base 6: mod_base = OTHER; note = 2'-O-methyladenosine
  modified_base 7: mod_base = OTHER; note = 2'-O-methyladenosine
  modified_base 8: mod_base = OTHER; note = 2'-O-methyladenosine
  modified_base 9: mod_base = OTHER; note = 2'-fluorouridine
  modified_base 10: mod_base = OTHER; note = 2'-O-methyladenosine
  modified_base 11: mod_base = cm
  modified_base 12: mod_base = OTHER; note = 2'-fluorocytidine
  modified_base 13: mod_base = OTHER; note = 2'-O-methyladenosine
  modified_base 14: mod_base = OTHER; note = 2'-fluorouridine
  modified_base 15: mod_base = cm
  modified_base 16: mod_base = OTHER; note = 2'-fluorouridine
  modified_base 17: mod_base = um
  modified_base 18: mod_base = gm
  modified_base 19: mod_base = gm
  modified_base 19^20: mod_base = OTHER; note = phosphorothioate linkage
  modified_base 20: mod_base = OTHER; note = 2'-O-methyladenosine
  modified_base 20^21: mod_base = OTHER; note = phosphorothioate linkage
  modified_base 21: mod_base = cm
  source 1..21: mol_type = other RNA
agtagaaataccatcttggac

SEQ ID NO: 108 - RNA, 21 nt, synthetic construct
  modified_base 1: mod_base = OTHER; note = 5'-cyclopropyl phosphonate-2'-O-methyluridine
  modified_base 1^2: mod_base = OTHER; note = phosphorothioate linkage
  modified_base 2: mod_base = OTHER; note = 2'-fluoroguanosine
  modified_base 2^3: mod_base = OTHER; note = phosphorothioate linkage
  modified_base 3: mod_base = um
  modified_base 4: mod_base = OTHER; note = 2'-O-methyladenosine
  modified_base 5: mod_base = gm
  modified_base 6: mod_base = OTHER; note = 2'-O-methyladenosine
  modified_base 7: mod_base = OTHER; note = 2'-O-methyladenosine
  modified_base 8: mod_base = OTHER; note = 2'-O-methyladenosine
  modified_base 9: mod_base = OTHER; note = 2'-fluorouridine
  modified_base 10: mod_base = OTHER; note = 2'-O-methyladenosine
  modified_base 11: mod_base = cm
  modified_base 12: mod_base = OTHER; note = 2'-fluorocytidine
  modified_base 13: mod_base = OTHER; note = 2'-O-methyladenosine
  modified_base 14: mod_base = OTHER; note = 2'-fluorouridine
  modified_base 15: mod_base = cm
  modified_base 16: mod_base = OTHER; note = 2'-fluorouridine
  modified_base 17: mod_base = um
  modified_base 18: mod_base = gm
  modified_base 19: mod_base = gm
  modified_base 19^20: mod_base = OTHER; note = phosphorothioate linkage
  modified_base 20: mod_base = OTHER; note = 2'-O-methyladenosine
  modified_base 20^21: mod_base = OTHER; note = phosphorothioate linkage
  modified_base 21: mod_base = cm
  source 1..21: mol_type = other RNA
tgtagaaataccatcttggac

SEQ ID NO: 109 - RNA, 21 nt, synthetic construct
  modified_base 1: mod_base = OTHER; note = 5'-cyclopropyl phosphonate-2'-O-methyluridine
  modified_base 1^2: mod_base = OTHER; note = phosphorothioate linkage
  modified_base 2: mod_base = OTHER; note = 2'-fluorouridine
  modified_base 2^3: mod_base = OTHER; note = phosphorothioate linkage
  modified_base 3: mod_base = um
  modified_base 3^4: mod_base = OTHER; note = phosphorothioate linkage
  modified_base 4: mod_base = OTHER; note = 2'-fluoroguanosine
  modified_base 5: mod_base = um
  modified_base 6: mod_base = OTHER; note = 2'-O-methyladenosine
  modified_base 7: mod_base = OTHER; note = 2'-O-methyladenosine
  modified_base 8: mod_base = um
  modified_base 9: mod_base = cm
  modified_base 10: mod_base = OTHER; note = 2'-O-methyladenosine
  modified_base 11: mod_base = gm
  modified_base 12: mod_base = OTHER; note = 2'-fluorouridine
  modified_base 13: mod_base = um
  modified_base 14: mod_base = OTHER; note = 2'-fluorocytidine
  modified_base 15: mod_base = cm
  modified_base 16: mod_base = OTHER; note = 2'-fluorouridine
  modified_base 17: mod_base = um
  modified_base 18: mod_base = gm
  modified_base 19: mod_base = um
  modified_base 20: mod_base = cm
  modified_base 20^21: mod_base = OTHER; note = phosphorothioate linkage
  modified_base 21: mod_base = cm
  source 1..21: mol_type = other RNA
tttgtaatcagttccttgtcc

SEQ ID NO: 110 - RNA, 21 nt, synthetic construct
  modified_base 1: mod_base = OTHER; note = 5'-cyclopropyl phosphonate-2'-O-methyluridine
  modified_base 1^2: mod_base = OTHER; note = phosphorothioate linkage
  modified_base 2: mod_base = OTHER; note = 2'-fluorouridine
  modified_base 2^3: mod_base = OTHER; note = phosphorothioate linkage
  modified_base 3: mod_base = um
  modified_base 3^4: mod_base = OTHER; note = phosphorothioate linkage
  modified_base 4: mod_base = OTHER; note = 2'-fluoroguanosine
  modified_base 5: mod_base = um
  modified_base 6: mod_base = OTHER; note = 2'-O-methyladenosine
  modified_base 7: mod_base = OTHER; note = 2'-O-methyladenosine
  modified_base 8: mod_base = OTHER; note = 2'-fluorouridine
  modified_base 9: mod_base = OTHER; note = 2'-fluorocytidine
  modified_base 10: mod_base = OTHER; note = 2'-O-methyladenosine
  modified_base 11: mod_base = gm
  modified_base 12: mod_base = OTHER; note = 2'-fluorouridine
  modified_base 13: mod_base = um
  modified_base 14: mod_base = OTHER; note = 2'-fluorocytidine
  modified_base 15: mod_base = cm
  modified_base 16: mod_base = OTHER; note = 2'-fluorouridine
  modified_base 17: mod_base = um
  modified_base 18: mod_base = gm
  modified_base 19: mod_base = um
  modified_base 20: mod_base = cm
  modified_base 20^21: mod_base = OTHER; note = phosphorothioate linkage
  modified_base 21: mod_base = cm
  source 1..21: mol_type = other RNA
tttgtaatcagttccttgtcc

SEQ ID NO: 111 - RNA, 21 nt, synthetic construct
  modified_base 1: mod_base = OTHER; note = 5'-cyclopropyl phosphonate-2'-O-methyluridine
  modified_base 1^2: mod_base = OTHER; note = phosphorothioate linkage
  modified_base 2: mod_base = OTHER; note = 2'-fluorouridine
  modified_base 2^3: mod_base = OTHER; note = phosphorothioate linkage
  modified_base 3: mod_base = um
  modified_base 4: mod_base = OTHER; note = 2'-fluoroguanosine
  modified_base 5: mod_base = um
  modified_base 6: mod_base = OTHER; note = 2'-O-methyladenosine
  modified_base 7: mod_base = OTHER; note = 2'-O-methyladenosine
  modified_base 8: mod_base = um
  modified_base 9: mod_base = cm
  modified_base 10: mod_base = OTHER; note = 2'-O-methyladenosine
  modified_base 11: mod_base = gm
  modified_base 12: mod_base = OTHER; note = 2'-fluorouridine
  modified_base 13: mod_base = um
  modified_base 14: mod_base = OTHER; note = 2'-fluorocytidine
  modified_base 15: mod_base = cm
  modified_base 16: mod_base = OTHER; note = 2'-fluorouridine
  modified_base 17: mod_base = um
  modified_base 18: mod_base = gm
  modified_base 19: mod_base = um
  modified_base 19^20: mod_base = OTHER; note = phosphorothioate linkage
  modified_base 20: mod_base = cm
  modified_base 20^21: mod_base = OTHER; note = phosphorothioate linkage
  modified_base 21: mod_base = cm
  source 1..21: mol_type = other RNA
tttgtaatcagttccttgtcc

SEQ ID NO: 112 - RNA, 21 nt, synthetic construct
  modified_base 1: mod_base = OTHER; note = 5'-cyclopropyl phosphonate-2'-O-methyluridine
  modified_base 2: mod_base = OTHER; note = 2'-fluorouridine
  modified_base 3: mod_base = um
  modified_base 4: mod_base = OTHER; note = 2'-fluoroguanosine
  modified_base 5: mod_base = um
  modified_base 6: mod_base = OTHER; note = 2'-O-methyladenosine
  modified_base 7: mod_base = OTHER; note = 2'-O-methyladenosine
  modified_base 8: mod_base = um
  modified_base 9: mod_base = cm
  modified_base 10: mod_base = OTHER; note = 2'-O-methyladenosine
  modified_base 11: mod_base = gm
  modified_base 12: mod_base = OTHER; note = 2'-fluorouridine
  modified_base 13: mod_base = um
  modified_base 14: mod_base = OTHER; note = 2'-fluorocytidine
  modified_base 15: mod_base = cm
  modified_base 16: mod_base = OTHER; note = 2'-fluorouridine
  modified_base 17: mod_base = um
  modified_base 18: mod_base = gm
  modified_base 19: mod_base = um
  modified_base 19^20: mod_base = OTHER; note = phosphorothioate linkage
  modified_base 20: mod_base = cm
  modified_base 20^21: mod_base = OTHER; note = phosphorothioate linkage
  modified_base 21: mod_base = cm
  source 1..21: mol_type = other RNA
tttgtaatcagttccttgtcc

SEQ ID NO: 113 - RNA, 21 nt, synthetic construct
  modified_base 1: mod_base = OTHER; note = 5'-cyclopropyl phosphonate-2'-O-methyluridine
  modified_base 1^2: mod_base = OTHER; note = phosphorothioate linkage
  modified_base 2: mod_base = OTHER; note = 2'-fluorouridine
  modified_base 2^3: mod_base = OTHER; note = phosphorothioate linkage
  modified_base 3: mod_base = um
  modified_base 3^4: mod_base = OTHER; note = phosphorothioate linkage
  modified_base 4: mod_base = OTHER; note = 2'-fluoroguanosine
  modified_base 5: mod_base = um
  modified_base 6: mod_base = OTHER; note = 2'-O-methyladenosine
  modified_base 7: mod_base = OTHER; note = 2'-O-methyladenosine
  modified_base 8: mod_base = um
  modified_base 9: mod_base = cm
  modified_base 10: mod_base = OTHER; note = 2'-O-methyladenosine
  modified_base 11: mod_base = gm
  modified_base 12: mod_base = OTHER; note = 2'-fluorouridine
  modified_base 13: mod_base = um
  modified_base 14: mod_base = OTHER; note = 2'-fluorocytidine
  modified_base 15: mod_base = cm
  modified_base 16: mod_base = OTHER; note = 2'-fluorouridine
  modified_base 17: mod_base = um
  modified_base 18: mod_base = gm
  modified_base 19: mod_base = um
  modified_base 20: mod_base = cm
  modified_base 20^21: mod_base = OTHER; note = phosphorothioate linkage
  modified_base 21: mod_base = gm
  source 1..21: mol_type = other RNA
tttgtaatcagttccttgtcg

SEQ ID NO: 114 - RNA, 21 nt, synthetic construct
  modified_base 1: mod_base = OTHER; note = 5'-cyclopropyl phosphonate-2'-O-methyluridine
  modified_base 1^2: mod_base = OTHER; note = phosphorothioate linkage
  modified_base 2: mod_base = OTHER; note = 2'-fluoroadenosine
  modified_base 2^3: mod_base = OTHER; note = phosphorothioate linkage
  modified_base 3: mod_base = OTHER; note = 2'-O-methyladenosine
  modified_base 3^4: mod_base = OTHER; note = phosphorothioate linkage
  modified_base 4: mod_base = OTHER; note = 2'-fluoroguanosine
  modified_base 5: mod_base = um
  modified_base 6: mod_base = OTHER; note = 2'-fluorouridine
  modified_base 7: mod_base = um
  modified_base 8: mod_base = OTHER; note = 2'-fluoroadenosine
  modified_base 9: mod_base = cm
  modified_base 10: mod_base = OTHER; note = 2'-fluoroadenosine
  modified_base 11: mod_base = um
  modified_base 12: mod_base = OTHER; note = 2'-fluorocytidine
  modified_base 13: mod_base = cm
  modified_base 14: mod_base = OTHER; note = 2'-fluorouridine
  modified_base 15: mod_base = gm
  modified_base 16: mod_base = OTHER; note = 2'-fluoroadenosine
  modified_base 17: mod_base = um
  modified_base 18: mod_base = OTHER; note = 2'-fluorouridine
  modified_base 19: mod_base = OTHER; note = 2'-O-methyladenosine
  modified_base 20: mod_base = OTHER; note = 2'-fluorouridine
  modified_base 20^21: mod_base = OTHER; note = phosphorothioate linkage
  modified_base 21: mod_base = gm
  source 1..21: mol_type = other RNA
taagtttacatcctgattatg

SEQ ID NO: 115 - RNA, 21 nt, synthetic construct
  modified_base 1: mod_base = OTHER; note = 5'-cyclopropyl phosphonate-2'-O-methyluridine
  modified_base 1^2: mod_base = OTHER; note = phosphorothioate linkage
  modified_base 2: mod_base = OTHER; note = 2'-fluoroadenosine
  modified_base 2^3: mod_base = OTHER; note = phosphorothioate linkage
  modified_base 3: mod_base = OTHER; note = 2'-O-methyladenosine
  modified_base 3^4: mod_base = OTHER; note = phosphorothioate linkage
  modified_base 4: mod_base = OTHER; note = 2'-fluoroguanosine
  modified_base 5: mod_base = um
  modified_base 6: mod_base = um
  modified_base 7: mod_base = um
  modified_base 8: mod_base = OTHER; note = 2'-O-methyladenosine
  modified_base 9: mod_base = cm
  modified_base 10: mod_base = OTHER; note = 2'-O-methyladenosine
  modified_base 11: mod_base = um
  modified_base 12: mod_base = OTHER; note = 2'-fluorocytidine
  modified_base 13: mod_base = cm
  modified_base 14: mod_base = OTHER; note = 2'-fluorouridine
  modified_base 15: mod_base = gm
  modified_base 16: mod_base = OTHER; note = 2'-fluoroadenosine
  modified_base 17: mod_base = um
  modified_base 18: mod_base = um
  modified_base 19: mod_base = OTHER; note = 2'-O-methyladenosine
  modified_base 20: mod_base = um
  modified_base 20^21: mod_base = OTHER; note = phosphorothioate linkage
  modified_base 21: mod_base = gm
  source 1..21: mol_type = other RNA
taagtttacatcctgattatg

SEQ ID NO: 116 - RNA, 21 nt, synthetic construct
  modified_base 1: mod_base = OTHER; note = 5'-cyclopropyl phosphonate-2'-O-methyluridine
  modified_base 1^2: mod_base = OTHER; note = phosphorothioate linkage
  modified_base 2: mod_base = OTHER; note = 2'-fluoroadenosine
  modified_base 2^3: mod_base = OTHER; note = phosphorothioate linkage
  modified_base 3: mod_base = OTHER; note = 2'-O-methyladenosine
  modified_base 3^4: mod_base = OTHER; note = phosphorothioate linkage
  modified_base 4: mod_base = OTHER; note = 2'-fluoroguanosine
  modified_base 5: mod_base = um
  modified_base 6: mod_base = um
  modified_base 7: mod_base = um
  modified_base 8: mod_base = OTHER; note = 2'-O-methyladenosine
  modified_base 9: mod_base = cm
  modified_base 10: mod_base = OTHER; note = 2'-O-methyladenosine
  modified_base 11: mod_base = um
  modified_base 12: mod_base = OTHER; note = 2'-fluorocytidine
  modified_base 13: mod_base = cm
  modified_base 14: mod_base = OTHER; note = 2'-fluorouridine
  modified_base 15: mod_base = gm
  modified_base 16: mod_base = OTHER; note = 2'-fluoroadenosine
  modified_base 17: mod_base = um
  modified_base 18: mod_base = um
  modified_base 19: mod_base = OTHER; note = 2'-O-methyladenosine
  modified_base 20: mod_base = cm
  modified_base 20^21: mod_base = OTHER; note = phosphorothioate linkage
  modified_base 21: mod_base = gm
  source 1..21: mol_type = other RNA
taagtttacatcctgattacg

SEQ ID NO: 117 - RNA, 21 nt, synthetic construct
  modified_base 1: mod_base = OTHER; note = 5'-cyclopropyl phosphonate-2'-O-methyluridine
  modified_base 1^2: mod_base = OTHER; note = phosphorothioate linkage
  modified_base 2: mod_base = OTHER; note = 2'-fluoroadenosine
  modified_base 2^3: mod_base = OTHER; note = phosphorothioate linkage
  modified_base 3: mod_base = OTHER; note = 2'-O-methyladenosine
  modified_base 3^4: mod_base = OTHER; note = phosphorothioate linkage
  modified_base 4: mod_base = OTHER; note = 2'-fluoroguanosine
  modified_base 5: mod_base = um
  modified_base 6: mod_base = um
  modified_base 7: mod_base = um
  modified_base 8: mod_base = OTHER; note = 2'-fluoroadenosine
  modified_base 9: mod_base = OTHER; note = 2'-fluorocytidine
  modified_base 10: mod_base = OTHER; note = 2'-O-methyladenosine
  modified_base 11: mod_base = um
  modified_base 12: mod_base = OTHER; note = 2'-fluorocytidine
  modified_base 13: mod_base = cm
  modified_base 14: mod_base = OTHER; note = 2'-fluorouridine
  modified_base 15: mod_base = gm
  modified_base 16: mod_base = OTHER; note = 2'-fluoroadenosine
  modified_base 17: mod_base = um
  modified_base 18: mod_base = um
  modified_base 19: mod_base = OTHER; note = 2'-O-methyladenosine
  modified_base 20: mod_base = um
  modified_base 20^21: mod_base = OTHER; note = phosphorothioate linkage
  modified_base 21: mod_base = gm
  source 1..21: mol_type = other RNA
taagtttacatcctgattatg

SEQ ID NO: 118 - RNA, 21 nt, synthetic construct
  modified_base 1: mod_base = OTHER; note = 5'-cyclopropyl phosphonate-2'-O-methyluridine
  modified_base 1^2: mod_base = OTHER; note = phosphorothioate linkage
  modified_base 2: mod_base = OTHER; note = 2'-fluoroadenosine
  modified_base 2^3: mod_base = OTHER; note = phosphorothioate linkage
  modified_base 3: mod_base = gm
  modified_base 3^4: mod_base = OTHER; note = phosphorothioate linkage
  modified_base 4: mod_base = OTHER; note = 2'-fluorocytidine
  modified_base 5: mod_base = um
  modified_base 6: mod_base = OTHER; note = 2'-fluoroadenosine
  modified_base 7: mod_base = um
  modified_base 8: mod_base = OTHER; note = 2'-fluoroguanosine
  modified_base 9: mod_base = um
  modified_base 10: mod_base = OTHER; note = 2'-fluoroadenosine
  modified_base 11: mod_base = OTHER; note = 2'-O-methyladenosine
  modified_base 12: mod_base = OTHER; note = 2'-fluoroguanosine
  modified_base 13: mod_base = um
  modified_base 14: mod_base = OTHER; note = 2'-fluorouridine
  modified_base 15: mod_base = um
  modified_base 16: mod_base = OTHER; note = 2'-fluoroadenosine
  modified_base 17: mod_base = cm
  modified_base 18: mod_base = OTHER; note = 2'-fluoroadenosine
  modified_base 19: mod_base = um
  modified_base 20: mod_base = OTHER; note = 2'-fluorocytidine
  modified_base 20^21: mod_base = OTHER; note = phosphorothioate linkage
  modified_base 21: mod_base = cm
  source 1..21: mol_type = other RNA
tagctatgtaagtttacatcc

SEQ ID NO: 119 - RNA, 21 nt, synthetic construct
  modified_base 1: mod_base = OTHER; note = 5'-cyclopropyl phosphonate-2'-O-methyluridine
  modified_base 1^2: mod_base = OTHER; note = phosphorothioate linkage
  modified_base 2: mod_base = OTHER; note = 2'-fluoroadenosine
  modified_base 2^3: mod_base = OTHER; note = phosphorothioate linkage
  modified_base 3: mod_base = gm
  modified_base 4: mod_base = cm
  modified_base 5: mod_base = um
  modified_base 6: mod_base = OTHER; note = 2'-O-methyladenosine
  modified_base 7: mod_base = um
  modified_base 8: mod_base = gm
  modified_base 9: mod_base = OTHER; note = 2'-fluorouridine
  modified_base 10: mod_base = OTHER; note = 2'-O-methyladenosine
  modified_base 11: mod_base = OTHER; note = 2'-O-methyladenosine
  modified_base 12: mod_base = OTHER; note = 2'-fluoroguanosine
  modified_base 13: mod_base = um
  modified_base 14: mod_base = OTHER; note = 2'-fluorouridine
  modified_base 15: mod_base = um
  modified_base 16: mod_base = OTHER; note = 2'-fluoroadenosine
  modified_base 17: mod_base = cm
  modified_base 18: mod_base = OTHER; note = 2'-O-methyladenosine
  modified_base 19: mod_base = um
  modified_base 19^20: mod_base = OTHER; note = phosphorothioate linkage
  modified_base 20: mod_base = cm
  modified_base 20^21: mod_base = OTHER; note = phosphorothioate linkage
  modified_base 21: mod_base = cm
  source 1..21: mol_type = other RNA
tagctatgtaagtttacatcc

SEQ ID NO: 120 - RNA, 21 nt, synthetic construct
  modified_base 1: mod_base = OTHER; note = 5'-cyclopropyl phosphonate-2'-O-methyluridine
  modified_base 1^2: mod_base = OTHER; note = phosphorothioate linkage
  modified_base 2: mod_base = OTHER; note = 2'-fluorocytidine
  modified_base 2^3: mod_base = OTHER; note = phosphorothioate linkage
  modified_base 3: mod_base = um
  modified_base 3^4: mod_base = OTHER; note = phosphorothioate linkage
  modified_base 4: mod_base = OTHER; note = 2'-fluorouridine
  modified_base 5: mod_base = OTHER; note = 2'-O-methyladenosine
  modified_base 6: mod_base = OTHER; note = 2'-O-methyladenosine
  modified_base 7: mod_base = gm
  modified_base 8: mod_base = OTHER; note = 2'-O-methyladenosine
  modified_base 9: mod_base = um
  modified_base 10: mod_base = um
  modified_base 11: mod_base = gm
  modified_base 12: mod_base = OTHER; note = 2'-fluorouridine
  modified_base 13: mod_base = cm
  modified_base 14: mod_base = OTHER; note = 2'-fluoroadenosine
  modified_base 15: mod_base = OTHER; note = 2'-O-methyladenosine
  modified_base 16: mod_base = OTHER; note = 2'-fluoroadenosine
  modified_base 17: mod_base = gm
  modified_base 18: mod_base = gm
  modified_base 19: mod_base = um
  modified_base 20: mod_base = gm
  modified_base 20^21: mod_base = OTHER; note = phosphorothioate linkage
  modified_base 21: mod_base = cm
  source 1..21: mol_type = other RNA
tcttaagattgtcaaaggtgc

SEQ ID NO: 121 - RNA, 21 nt, synthetic construct
  modified_base 1: mod_base = OTHER; note = 5'-cyclopropyl phosphonate-2'-O-methyluridine
  modified_base 1^2: mod_base = OTHER; note = phosphorothioate linkage
  modified_base 2: mod_base = OTHER; note = 2'-fluorocytidine
  modified_base 2^3: mod_base = OTHER; note = phosphorothioate linkage
  modified_base 3: mod_base = um
  modified_base 3^4: mod_base = OTHER; note = phosphorothioate linkage
  modified_base 4: mod_base = OTHER; note = 2'-fluorouridine
  modified_base 5: mod_base = OTHER; note = 2'-O-methyladenosine
  modified_base 6: mod_base = OTHER; note = 2'-O-methyladenosine
  modified_base 7: mod_base = gm
  modified_base 8: mod_base = OTHER; note = 2'-fluoroadenosine
  modified_base 9: mod_base = OTHER; note = 2'-fluorouridine
  modified_base 10: mod_base = um
  modified_base 11: mod_base = gm
  modified_base 12: mod_base = OTHER; note = 2'-fluorouridine
  modified_base 13: mod_base = cm
  modified_base 14: mod_base = OTHER; note = 2'-fluoroadenosine
  modified_base 15: mod_base = OTHER; note = 2'-O-methyladenosine
  modified_base 16: mod_base = OTHER; note = 2'-fluoroadenosine
  modified_base 17: mod_base = gm
  modified_base 18: mod_base = gm
  modified_base 19: mod_base = um
  modified_base 20: mod_base = gm
  modified_base 20^21: mod_base = OTHER; note = phosphorothioate linkage
  modified_base 21: mod_base = cm
  source 1..21: mol_type = other RNA
tcttaagattgtcaaaggtgc

SEQ ID NO: 122 - RNA, 21 nt, synthetic construct
  modified_base 1: mod_base = OTHER; note = 5'-cyclopropyl phosphonate-2'-O-methyluridine
  modified_base 1^2: mod_base = OTHER; note = phosphorothioate linkage
  modified_base 2: mod_base = OTHER; note = 2'-fluorocytidine
  modified_base 2^3: mod_base = OTHER; note = phosphorothioate linkage
  modified_base 3: mod_base = um
  modified_base 3^4: mod_base = OTHER; note = phosphorothioate linkage
  modified_base 4: mod_base = um
  modified_base 5: mod_base = OTHER; note = 2'-O-methyladenosine
  modified_base 6: mod_base = OTHER; note = 2'-O-methyladenosine
  modified_base 7: mod_base = OTHER; note = 2'-fluoroguanosine
  modified_base 8: mod_base = OTHER; note = 2'-O-methyladenosine
  modified_base 9: mod_base = um
  modified_base 10: mod_base = um
  modified_base 11: mod_base = gm
  modified_base 12: mod_base = OTHER; note = 2'-fluorouridine
  modified_base 13: mod_base = cm
  modified_base 14: mod_base = OTHER; note = 2'-fluoroadenosine
  modified_base 15: mod_base = OTHER; note = 2'-O-methyladenosine
  modified_base 16: mod_base = OTHER; note = 2'-fluoroadenosine
  modified_base 17: mod_base = gm
  modified_base 18: mod_base = gm
  modified_base 19: mod_base = um
  modified_base 20: mod_base = gm
  modified_base 20^21: mod_base = OTHER; note = phosphorothioate linkage
  modified_base 21: mod_base = cm
  source 1..21: mol_type = other RNA
tcttaagattgtcaaaggtgc

SEQ ID NO: 123 - RNA, 21 nt, synthetic construct
  modified_base 1: mod_base = OTHER; note = 5'-cyclopropyl phosphonate-2'-O-methyluridine
  modified_base 1^2: mod_base = OTHER; note = phosphorothioate linkage
  modified_base 2: mod_base = OTHER; note = 2'-fluorouridine
  modified_base 2^3: mod_base = OTHER; note = phosphorothioate linkage
  modified_base 3: mod_base = OTHER; note = 2'-O-methyladenosine
  modified_base 3^4: mod_base = OTHER; note = phosphorothioate linkage
  modified_base 4: mod_base = OTHER; note = 2'-fluoroguanosine
  modified_base 5: mod_base = um
  modified_base 6: mod_base = OTHER; note = 2'-fluoroadenosine
  modified_base 7: mod_base = gm
  modified_base 8: mod_base = OTHER; note = 2'-fluoroguanosine
  modified_base 9: mod_base = um
  modified_base 10: mod_base = OTHER; note = 2'-fluoroadenosine
  modified_base 11: mod_base = um
  modified_base 12: mod_base = OTHER; note = 2'-fluoroadenosine
  modified_base 13: mod_base = OTHER; note = 2'-O-methyladenosine
  modified_base 14: mod_base = OTHER; note = 2'-fluorocytidine
  modified_base 15: mod_base = cm
  modified_base 16: mod_base = OTHER; note = 2'-fluoroadenosine
  modified_base 17: mod_base = cm
  modified_base 18: mod_base = OTHER; note = 2'-fluoroadenosine
  modified_base 19: mod_base = gm
  modified_base 20: mod_base = OTHER; note = 2'-fluorocytidine
  modified_base 20^21: mod_base = OTHER; note = phosphorothioate linkage
  modified_base 21: mod_base = OTHER; note = 2'-O-methyladenosine
  source 1..21: mol_type = other RNA
ttagtaggtataaccacagca

SEQ ID NO: 124 - RNA, 21 nt, synthetic construct
  modified_base 1: mod_base = OTHER; note = 5'-cyclopropyl phosphonate-2'-O-methyladenosine
  modified_base 1^2: mod_base = OTHER; note = phosphorothioate linkage
  modified_base 2: mod_base = OTHER; note = 2'-fluoroadenosine
  modified_base 2^3: mod_base = OTHER; note = phosphorothioate linkage
  modified_base 3: mod_base = gm
  modified_base 3^4: mod_base = OTHER; note = phosphorothioate linkage
  modified_base 4: mod_base = OTHER; note = 2'-fluoroadenosine
  modified_base 5: mod_base = OTHER; note = 2'-O-methyladenosine
  modified_base 6: mod_base = OTHER; note = 2'-fluoroguanosine
  modified_base 7: mod_base = um
  modified_base 8: mod_base = OTHER; note = 2'-fluoroguanosine
  modified_base 9: mod_base = um
  modified_base 10: mod_base = OTHER; note = 2'-fluorocytidine
  modified_base 11: mod_base = um
  modified_base 12: mod_base = OTHER; note = 2'-fluorouridine
  modified_base 13: mod_base = OTHER; note = 2'-O-methyladenosine
  modified_base 14: mod_base = OTHER; note = 2'-fluoroadenosine
  modified_base 15: mod_base = gm
  modified_base 16: mod_base = OTHER; note = 2'-fluoroadenosine
  modified_base 17: mod_base = um
  modified_base 18: mod_base = OTHER; note = 2'-fluorouridine
  modified_base 19: mod_base = gm
  modified_base 20: mod_base = OTHER; note = 2'-fluorouridine
  modified_base 20^21: mod_base = OTHER; note = phosphorothioate linkage
  modified_base 21: mod_base = cm
  source 1..21: mol_type = other RNA
aagaagtgtcttaagattgtc

SEQ ID NO: 125 - RNA, 21 nt, synthetic construct
  modified_base 1: mod_base = OTHER; note = 5'-cyclopropyl phosphonate-2'-O-methyluridine
  modified_base 1^2: mod_base = OTHER; note = phosphorothioate linkage
  modified_base 2: mod_base = OTHER; note = 2'-fluorocytidine
  modified_base 2^3: mod_base = OTHER; note = phosphorothioate linkage
  modified_base 3: mod_base = OTHER; note = 2'-O-methyladenosine
  modified_base 3^4: mod_base = OTHER; note = phosphorothioate linkage
  modified_base 4: mod_base = OTHER; note = 2'-fluorouridine
  modified_base 5: mod_base = OTHER; note = 2'-O-methyladenosine
  modified_base 6: mod_base = OTHER; note = 2'-fluoroadenosine
  modified_base 7: mod_base = gm
  modified_base 8: mod_base = OTHER; note = 2'-fluoroadenosine
  modified_base 9: mod_base = OTHER; note = 2'-O-methyladenosine
  modified_base 10: mod_base = OTHER; note = 2'-fluoroadenosine
  modified_base 11: mod_base = gm
  modified_base 12: mod_base = OTHER; note = 2'-fluorouridine
  modified_base 13: mod_base = gm
  modified_base 14: mod_base = OTHER; note = 2'-fluorouridine
  modified_base 15: mod_base = gm
  modified_base 16: mod_base = OTHER; note = 2'-fluorocytidine
  modified_base 17: mod_base = cm
  modified_base 18: mod_base = OTHER; note = 2'-fluorocytidine
  modified_base 19: mod_base = OTHER; note = 2'-O-methyladenosine
  modified_base 20: mod_base = OTHER; note = 2'-fluorouridine
  modified_base 20^21: mod_base = OTHER; note = phosphorothioate linkage
  modified_base 21: mod_base = gm
  source 1..21: mol_type = other RNA
tcataagaaagtgtgcccatg

SEQ ID NO: 126 - RNA, 21 nt, synthetic construct
  modified_base 1: mod_base = OTHER; note = 5'-cyclopropyl phosphonate-2'-O-methyluridine
  modified_base 1^2: mod_base = OTHER; note = phosphorothioate linkage
  modified_base 2: mod_base = OTHER; note = 2'-fluoroadenosine
  modified_base 2^3: mod_base = OTHER; note = phosphorothioate linkage
  modified_base 3: mod_base = OTHER; note = 2'-O-methyladenosine
  modified_base 3^4: mod_base = OTHER; note = phosphorothioate linkage
  modified_base 4: mod_base = OTHER; note = 2'-fluorocytidine
  modified_base 5: mod_base = um
  modified_base 6: mod_base = OTHER; note = 2'-fluorouridine
  modified_base 7: mod_base = OTHER; note = 2'-O-methyladenosine
  modified_base 8: mod_base = OTHER; note = 2'-fluoroguanosine
  modified_base 9: mod_base = gm
  modified_base 10: mod_base = OTHER; note = 2'-fluoroguanosine
  modified_base 11: mod_base = um
  modified_base 12: mod_base = OTHER; note = 2'-fluorocytidine
  modified_base 13: mod_base = OTHER; note = 2'-O-methyladenosine
  modified_base 14: mod_base = OTHER; note = 2'-fluoroadenosine
  modified_base 15: mod_base = um
  modified_base 16: mod_base = OTHER; note = 2'-fluorouridine
  modified_base 17: mod_base = um
  modified_base 18: mod_base = OTHER; note = 2'-fluorocytidine
  modified_base 19: mod_base = um
  modified_base 20: mod_base = OTHER; note = 2'-fluoroguanosine
  modified_base 20^21: mod_base = OTHER; note = phosphorothioate linkage
  modified_base 21: mod_base = um
  source 1..21: mol_type = other RNA
taacttagggtcaatttctgt

SEQ ID NO: 127 - RNA, 21 nt, synthetic construct
  modified_base 1: mod_base = OTHER; note = 5'-cyclopropyl phosphonate-2'-O-methyladenosine
  modified_base 1^2: mod_base = OTHER; note = phosphorothioate linkage
  modified_base 2: mod_base = OTHER; note = 2'-fluoroadenosine
  modified_base 2^3: mod_base = OTHER; note = phosphorothioate linkage
  modified_base 3: mod_base = OTHER; note = 2'-O-methyladenosine
  modified_base 3^4: mod_base = OTHER; note = phosphorothioate linkage
  modified_base 4: mod_base = OTHER; note = 2'-fluorocytidine
  modified_base 5: mod_base = gm
  modified_base 6: mod_base = OTHER; note = 2'-fluorouridine
  modified_base 7: mod_base = OTHER; note = 2'-O-methyladenosine
  modified_base 8: mod_base = OTHER; note = 2'-fluorouridine
  modified_base 9: mod_base = um
  modified_base 10: mod_base = OTHER; note = 2'-fluoroadenosine
  modified_base 11: mod_base = OTHER; note = 2'-O-methyladenosine
  modified_base 12: mod_base = OTHER; note = 2'-fluorocytidine
  modified_base 13: mod_base = gm
  modified_base 14: mod_base = OTHER; note = 2'-fluorouridine
  modified_base 15: mod_base = OTHER; note = 2'-O-methyladenosine
  modified_base 16: mod_base = OTHER; note = 2'-fluoroadenosine
  modified_base 17: mod_base = gm
  modified_base 18: mod_base = OTHER; note = 2'-fluorocytidine
  modified_base 19: mod_base = OTHER; note = 2'-O-methyladenosine
  modified_base 20: mod_base = OTHER; note = 2'-fluorouridine
  modified_base 20^21: mod_base = OTHER; note = phosphorothioate linkage
  modified_base 21: mod_base = cm
  source 1..21: mol_type = other RNA
aaacgtattaacgtaagcatc

SEQ ID NO: 128 - RNA, 21 nt, synthetic construct
  modified_base 1: mod_base = OTHER; note = 5'-cyclopropyl phosphonate-2'-O-methyladenosine
  modified_base 1^2: mod_base = OTHER; note = phosphorothioate linkage
  modified_base 2: mod_base = OTHER; note = 2'-fluorouridine
  modified_base 2^3: mod_base = OTHER; note = phosphorothioate linkage
  modified_base 3: mod_base = OTHER; note = 2'-O-methyladenosine
  modified_base 3^4: mod_base = OTHER; note = phosphorothioate linkage
  modified_base 4: mod_base = OTHER; note = 2'-fluorocytidine
  modified_base 5: mod_base = OTHER; note = 2'-O-methyladenosine
  modified_base 6: mod_base = OTHER; note = 2'-fluorouridine
  modified_base 7: mod_base = um
  modified_base 8: mod_base = OTHER; note = 2'-fluorouridine
  modified_base 9: mod_base = gm
  modified_base 10: mod_base = OTHER; note = 2'-fluoroguanosine
  modified_base 11: mod_base = gm
  modified_base 12: mod_base = OTHER; note = 2'-fluorouridine
  modified_base 13: mod_base = cm
  modified_base 14: mod_base = OTHER; note = 2'-fluoroadenosine
  modified_base 15: mod_base = um
  modified_base 16: mod_base = OTHER; note = 2'-fluoroadenosine
  modified_base 17: mod_base = gm
  modified_base 18: mod_base = OTHER; note = 2'-fluorocytidine
  modified_base 19: mod_base = um
  modified_base 20: mod_base = OTHER; note = 2'-fluorouridine
  modified_base 20^21: mod_base = OTHER; note = phosphorothioate linkage
  modified_base 21: mod_base = gm
  source 1..21: mol_type = other RNA
atacatttgggtcatagcttg

SEQ ID NO: 129 - RNA, 21 nt, synthetic construct
  modified_base 1: mod_base = OTHER; note = 5'-cyclopropyl phosphonate-2'-O-methyluridine
  modified_base 1^2: mod_base = OTHER; note = phosphorothioate linkage
  modified_base 2: mod_base = OTHER; note = 2'-fluorocytidine
  modified_base 2^3: mod_base = OTHER; note = phosphorothioate linkage
  modified_base 3: mod_base = OTHER; note = 2'-O-methyladenosine
  modified_base 3^4: mod_base = OTHER; note = phosphorothioate linkage
  modified_base 4: mod_base = OTHER; note = 2'-fluorouridine
  modified_base 5: mod_base = um
  modified_base 6: mod_base = OTHER; note = 2'-fluoroadenosine
  modified_base 7: mod_base = OTHER; note = 2'-O-methyladenosine
  modified_base 8: mod_base = OTHER; note = 2'-fluoroguanosine
  modified_base 9: mod_base = OTHER; note = 2'-O-methyladenosine
  modified_base 10: mod_base = OTHER; note = 2'-fluorouridine
  modified_base 11: mod_base = cm
  modified_base 12: mod_base = OTHER; note = 2'-fluorouridine
  modified_base 13: mod_base = gm
  modified_base 14: mod_base = OTHER; note = 2'-fluoroadenosine
  modified_base 15: mod_base = OTHER; note = 2'-O-methyladenosine
  modified_base 16: mod_base = OTHER; note = 2'-fluorouridine
  modified_base 17: mod_base = cm
  modified_base 18: mod_base = OTHER; note = 2'-fluoroguanosine
  modified_base 19: mod_base = OTHER; note = 2'-O-methyladenosine
  modified_base 20: mod_base = OTHER; note = 2'-fluorocytidine
  modified_base 20^21: mod_base = OTHER; note = phosphorothioate linkage
  modified_base 21: mod_base = OTHER; note = 2'-O-methyladenosine
  source 1..21: mol_type = other RNA
tcattaagatctgaatcgaca

SEQ ID NO: 130 - DNA, 21 bp, synthetic construct
  modified_base 1: mod_base = OTHER; note = 5'-cyclopropyl phosphonate-2'-O-methyladenosine
  modified_base 1^2: mod_base = OTHER; note = phosphorothioate linkage
  modified_base 2: mod_base = OTHER; note = 2'-fluoroadenosine
  modified_base 2^3: mod_base = OTHER; note = phosphorothioate linkage
  modified_base 3: mod_base = gm
  modified_base 3^4: mod_base = OTHER; note = phosphorothioate linkage
  modified_base 4: mod_base = OTHER; note = 2'-fluoroadenosine
  modified_base 5: mod_base = OTHER; note = 2'-O-methyladenosine
  modified_base 6: mod_base = OTHER; note = 2'-fluorouridine
  modified_base 7: mod_base = OTHER; note = 2'-O-methyladenosine
  modified_base 8: mod_base = OTHER; note = 2'-fluorocytidine
  modified_base 9: mod_base = cm
  modified_base 10: mod_base = OTHER; note = 2'-fluoroadenosine
  modified_base 11: mod_base = cm
  modified_base 12: mod_base = OTHER; note = 2'-fluoroguanosine
  modified_base 13: mod_base = OTHER; note = 2'-O-methyladenosine
  modified_base 14: mod_base = OTHER; note = 2'-fluoroadenosine
  modified_base 15: mod_base = OTHER; note = 2'-O-methyladenosine
  modified_base 16: mod_base = OTHER; note = 2'-fluoroguanosine
  modified_base 17: mod_base = cm
  modified_base 18: mod_base = OTHER; note = 2'-fluoroadenosine
  modified_base 19: mod_base = OTHER; note = 2'-O-methyladenosine
  modified_base 20: mod_base = OTHER; note = 2'-fluoroguanosine
  modified_base 20^21: mod_base = OTHER; note = phosphorothioate linkage
  modified_base 21: mod_base = cm
  source 1..21: mol_type = other DNA
aagaataccacgaaagcaagc

SEQ ID NO: 131 - RNA, 21 nt, synthetic construct
  modified_base 1: mod_base = OTHER; note = 5'-cyclopropyl phosphonate-2'-O-methyluridine
  modified_base 2: mod_base = OTHER; note = 2'-fluorouridine
  modified_base 3: mod_base = OTHER; note = 2'-O-methyladenosine
  modified_base 4: mod_base = OTHER; note = 2'-fluoroguanosine
  modified_base 5: mod_base = gm
  modified_base 6: mod_base = OTHER; note = 2'-O-methyladenosine
  modified_base 7: mod_base = um
  modified_base 8: mod_base = um
  modified_base 9: mod_base = um
  modified_base 10: mod_base = um
  modified_base 11: mod_base = cm
  modified_base 12: mod_base = OTHER; note = 2'-fluorocytidine
  modified_base 13: mod_base = OTHER; note = 2'-O-methyladenosine
  modified_base 14: mod_base = OTHER; note = 2'-fluorocytidine
  modified_base 15: mod_base = um
  modified_base 16: mod_base = OTHER; note = 2'-fluoroadenosine
  modified_base 17: mod_base = cm
  modified_base 18: mod_base = um
  modified_base 19: mod_base = um
  modified_base 19^20: mod_base = OTHER; note = phosphorothioate linkage
  modified_base 20: mod_base = cm
  modified_base 20^21: mod_base = OTHER; note = phosphorothioate linkage
  modified_base 21: mod_base = cm
  source 1..21: mol_type = other RNA
ttaggattttccactacttcc

SEQ ID NO: 132 - RNA, 21 nt, synthetic construct
  modified_base 1: mod_base = OTHER; note = 5'-cyclopropyl phosphonate-2'-O-methyluridine
  modified_base 2: mod_base = OTHER; note = 2'-fluorouridine
  modified_base 3: mod_base = OTHER; note = 2'-O-methyladenosine
  modified_base 4: mod_base = OTHER; note = 2'-fluoroguanosine
  modified_base 5: mod_base = gm
  modified_base 6: mod_base = OTHER; note = 2'-O-methyladenosine
  modified_base 7: mod_base = um
  modified_base 8: mod_base = um
  modified_base 9: mod_base = um
  modified_base 10: mod_base = um
  modified_base 11: mod_base = cm
  modified_base 12: mod_base = OTHER; note = 2'-fluorocytidine
  modified_base 13: mod_base = OTHER; note = 2'-O-methyladenosine
  modified_base 14: mod_base = OTHER; note = 2'-fluorocytidine
  modified_base 15: mod_base = um
  modified_base 16: mod_base = OTHER; note = 2'-fluoroadenosine
  modified_base 17: mod_base = cm
  modified_base 18: mod_base = um
  modified_base 19: mod_base = um
  modified_base 19^20: mod_base = OTHER; note = phosphorothioate linkage
  modified_base 20: mod_base = cm
  modified_base 20^21: mod_base = OTHER; note = phosphorothioate linkage
  modified_base 21: mod_base = gm
  source 1..21: mol_type = other RNA
ttaggattttccactacttcg

SEQ ID NO: 133 - RNA, 21 nt, synthetic construct
  modified_base 1: mod_base = OTHER; note = 5'-cyclopropyl phosphonate-2'-O-methyluridine
  modified_base 1^2: mod_base = OTHER; note = phosphorothioate linkage
  modified_base 2: mod_base = OTHER; note = 2'-fluorouridine
  modified_base 2^3: mod_base = OTHER; note = phosphorothioate linkage
  modified_base 3: mod_base = um
  modified_base 4: mod_base = OTHER; note = 2'-fluoroguanosine
  modified_base 5: mod_base = um
  modified_base 6: mod_base = OTHER; note = 2'-O-methyladenosine
  modified_base 7: mod_base = OTHER; note = 2'-O-methyladenosine
  modified_base 8: mod_base = um
  modified_base 9: mod_base = cm
  modified_base 10: mod_base = OTHER; note = 2'-O-methyladenosine
  modified_base 11: mod_base = gm
  modified_base 12: mod_base = OTHER; note = 2'-fluorouridine
  modified_base 13: mod_base = um
  modified_base 14: mod_base = OTHER; note = 2'-fluorocytidine
  modified_base 15: mod_base = cm
  modified_base 16: mod_base = OTHER; note = 2'-fluorouridine
  modified_base 17: mod_base = um
  modified_base 18: mod_base = gm
  modified_base 19: mod_base = um
  modified_base 19^20: mod_base = OTHER; note = phosphorothioate linkage
  modified_base 20: mod_base = cm
  modified_base 20^21: mod_base = OTHER; note = phosphorothioate linkage
  modified_base 21: mod_base = um
  source 1..21: mol_type = other RNA
tttgtaatcagttccttgtct

SEQ ID NO: 134 - RNA, 21 nt, synthetic construct
  modified_base 1: mod_base = OTHER; note = 5'-cyclopropyl phosphonate-2'-O-methyluridine
  modified_base 1^2: mod_base = OTHER; note = phosphorothioate linkage
  modified_base 2: mod_base = OTHER; note = 2'-fluoroadenosine
  modified_base 2^3: mod_base = OTHER; note = phosphorothioate linkage
  modified_base 3: mod_base = OTHER; note = 2'-O-methyladenosine
  modified_base 4: mod_base = OTHER; note = 2'-fluoroguanosine
  modified_base 5: mod_base = um
  modified_base 6: mod_base = um
  modified_base 7: mod_base = um
  modified_base 8: mod_base = OTHER; note = 2'-O-methyladenosine
  modified_base 9: mod_base = cm
  modified_base 10: mod_base = OTHER; note = 2'-O-methyladenosine
  modified_base 11: mod_base = um
  modified_base 12: mod_base = OTHER; note = 2'-fluorocytidine
  modified_base 13: mod_base = cm
  modified_base 14: mod_base = OTHER; note = 2'-fluorouridine
  modified_base 15: mod_base = gm
  modified_base 16: mod_base = OTHER; note = 2'-fluoroadenosine
  modified_base 17: mod_base = um
  modified_base 18: mod_base = um
  modified_base 19: mod_base = OTHER; note = 2'-O-methyladenosine
  modified_base 19^20: mod_base = OTHER; note = phosphorothioate linkage
  modified_base 20: mod_base = um
  modified_base 20^21: mod_base = OTHER; note = phosphorothioate linkage
  modified_base 21: mod_base = gm
  source 1..21: mol_type = other RNA
taagtttacatcctgattatg

SEQ ID NO: 135 - RNA, 21 nt, synthetic construct
  modified_base 1: mod_base = OTHER; note = 5'-cyclopropyl phosphonate-2'-O-methyluridine
  modified_base 2: mod_base = OTHER; note = 2'-fluoroadenosine
  modified_base 3: mod_base = OTHER; note = 2'-O-methyladenosine
  modified_base 4: mod_base = OTHER; note = 2'-fluoroguanosine
  modified_base 5: mod_base = um
  modified_base 6: mod_base = um
  modified_base 7: mod_base = um
  modified_base 8: mod_base = OTHER; note = 2'-O-methyladenosine
  modified_base 9: mod_base = cm
  modified_base 10: mod_base = OTHER; note = 2'-O-methyladenosine
  modified_base 11: mod_base = um
  modified_base 12: mod_base = OTHER; note = 2'-fluorocytidine
  modified_base 13: mod_base = cm
  modified_base 14: mod_base = OTHER; note = 2'-fluorouridine
  modified_base 15: mod_base = gm
  modified_base 16: mod_base = OTHER; note = 2'-fluoroadenosine
  modified_base 17: mod_base = um
  modified_base 18: mod_base = um
  modified_base 19: mod_base = OTHER; note = 2'-O-methyladenosine
  modified_base 20: mod_base = um
  modified_base 20^21: mod_base = OTHER; note = phosphorothioate linkage
  modified_base 21: mod_base = gm
  source 1..21: mol_type = other RNA
taagtttacatcctgattatg

SEQ ID NO: 136 - RNA, 21 nt, synthetic construct
  modified_base 1: mod_base = OTHER; note = 5'-cyclopropyl phosphonate-2'-O-methyluridine
  modified_base 2: mod_base = OTHER; note = 2'-fluoroadenosine
  modified_base 3: mod_base = OTHER; note = 2'-O-methyladenosine
  modified_base 4: mod_base = OTHER; note = 2'-fluoroguanosine
  modified_base 5: mod_base = um
  modified_base 6: mod_base = um
  modified_base 7: mod_base = um
  modified_base 8: mod_base = OTHER; note = 2'-O-methyladenosine
  modified_base 9: mod_base = cm
  modified_base 10: mod_base = OTHER; note = 2'-O-methyladenosine
  modified_base 11: mod_base = um
  modified_base 12: mod_base = OTHER; note = 2'-fluorocytidine
  modified_base 13: mod_base = cm
  modified_base 14: mod_base = OTHER; note = 2'-fluorouridine
  modified_base 15: mod_base = gm
  modified_base 16: mod_base = OTHER; note = 2'-fluoroadenosine
  modified_base 17: mod_base = um
  modified_base 18: mod_base = um
  modified_base 19: mod_base = OTHER; note = 2'-O-methyladenosine
  modified_base 19^20: mod_base = OTHER; note = phosphorothioate linkage
  modified_base 20: mod_base = cm
  modified_base 20^21: mod_base = OTHER; note = phosphorothioate linkage
  modified_base 21: mod_base = gm
  source 1..21: mol_type = other RNA
taagtttacatcctgattacg

SEQ ID NO: 137 - RNA, 21 nt, synthetic construct
  modified_base 1: mod_base = OTHER; note = 5'-cyclopropyl phosphonate-2'-O-methyluridine
  modified_base 1^2: mod_base = OTHER; note = phosphorothioate linkage
  modified_base 2: mod_base = OTHER; note = 2'-fluorouridine
  modified_base 2^3: mod_base = OTHER; note = phosphorothioate linkage
  modified_base 3: mod_base = OTHER; note = 2'-O-methyladenosine
  modified_base 4: mod_base = OTHER; note = 2'-fluoroguanosine
  modified_base 5: mod_base = gm
  modified_base 6: mod_base = OTHER; note = 2'-O-methyladenosine
  modified_base 7: mod_base = um
  modified_base 8: mod_base = um
  modified_base 9: mod_base = um
  modified_base 10: mod_base = um
  modified_base 11: mod_base = cm
  modified_base 12: mod_base = OTHER; note = 2'-fluorocytidine
  modified_base 13: mod_base = OTHER; note = 2'-O-methyladenosine
  modified_base 14: mod_base = OTHER; note = 2'-fluorocytidine
  modified_base 15: mod_base = um
  modified_base 16: mod_base = OTHER; note = 2'-fluoroadenosine
  modified_base 17: mod_base = cm
  modified_base 18: mod_base = um
  modified_base 19: mod_base = um
  modified_base 19^20: mod_base = OTHER; note = phosphorothioate linkage
  modified_base 20: mod_base = cm
  modified_base 20^21: mod_base = OTHER; note = phosphorothioate linkage
  modified_base 21: mod_base = gm
  source 1..21: mol_type = other RNA
ttaggattttccactacttcg

SEQ ID NO: 138 - RNA, 21 nt, synthetic construct
  modified_base 1: mod_base = um
  modified_base 1^2: mod_base = OTHER; note = phosphorothioate linkage
  modified_base 2: mod_base = OTHER; note = 2'-fluorouridine
  modified_base 2^3: mod_base = OTHER; note = phosphorothioate linkage
  modified_base 3: mod_base = OTHER; note = 2'-O-methyladenosine
  modified_base 3^4: mod_base = OTHER; note = phosphorothioate linkage
  modified_base 4: mod_base = OTHER; note = 2'-fluoroguanosine
  modified_base 5: mod_base = um
  modified_base 6: mod_base = OTHER; note = 2'-fluoroadenosine
  modified_base 7: mod_base = gm
  modified_base 8: mod_base = OTHER; note = 2'-fluoroguanosine
  modified_base 9: mod_base = um
  modified_base 10: mod_base = OTHER; note = 2'-fluoroadenosine
  modified_base 11: mod_base = um
  modified_base 12: mod_base = OTHER; note = 2'-fluoroadenosine
  modified_base 13: mod_base = OTHER; note = 2'-O-methyladenosine
  modified_base 14: mod_base = OTHER; note = 2'-fluorocytidine
  modified_base 15: mod_base = cm
  modified_base 16: mod_base = OTHER; note = 2'-fluoroadenosine
  modified_base 17: mod_base = cm
  modified_base 18: mod_base = OTHER; note = 2'-fluoroadenosine
  modified_base 19: mod_base = gm
  modified_base 20: mod_base = OTHER; note = 2'-fluorocytidine
  modified_base 20^21: mod_base = OTHER; note = phosphorothioate linkage
  modified_base 21: mod_base = OTHER; note = 2'-O-methyladenosine
  source 1..21: mol_type = other RNA
ttagtaggtataaccacagca

SEQ ID NO: 139 - RNA, 21 nt, synthetic construct
  modified_base 1: mod_base = um
  modified_base 1^2: mod_base = OTHER; note = phosphorothioate linkage
  modified_base 2: mod_base = OTHER; note = 2'-fluorouridine
  modified_base 2^3: mod_base = OTHER; note = phosphorothioate linkage
  modified_base 3: mod_base = OTHER; note = 2'-fluoroadenosine
  modified_base 3^4: mod_base = OTHER; note = phosphorothioate linkage
  modified_base 4: mod_base = gm
  modified_base 5: mod_base = um
  modified_base 6: mod_base = OTHER; note = 2'-O-methyladenosine
  modified_base 7: mod_base = gm
  modified_base 8: mod_base = gm
  modified_base 9: mod_base = um
  modified_base 10: mod_base = OTHER; note = 2'-O-methyladenosine
  modified_base 11: mod_base = um
  modified_base 12: mod_base = OTHER; note = 2'-fluoroadenosine
  modified_base 13: mod_base = OTHER; note = 2'-O-methyladenosine
  modified_base 14: mod_base = OTHER; note = 2'-fluorocytidine
  modified_base 15: mod_base = cm
  modified_base 16: mod_base = OTHER; note = 2'-fluoroadenosine
  modified_base 17: mod_base = cm
  modified_base 18: mod_base = OTHER; note = 2'-O-methyladenosine
  modified_base 19: mod_base = gm
  modified_base 20: mod_base = cm
  modified_base 20^21: mod_base = OTHER; note = phosphorothioate linkage
  modified_base 21: mod_base = OTHER; note = 2'-O-methyladenosine
  source 1..21: mol_type = other RNA
ttagtaggtataaccacagca

SEQ ID NO: 140 - RNA, 21 nt, synthetic construct
  modified_base 1: mod_base = um
  modified_base 1^2: mod_base = OTHER; note = phosphorothioate linkage
  modified_base 2: mod_base = OTHER; note = 2'-fluorouridine
  modified_base 2^3: mod_base = OTHER; note = phosphorothioate linkage
  modified_base 3: mod_base = OTHER; note = 2'-O-methyladenosine
  modified_base 3^4: mod_base = OTHER; note = phosphorothioate linkage
  modified_base 4: mod_base = gm
  modified_base 5: mod_base = um
  modified_base 6: mod_base = OTHER; note = 2'-O-methyladenosine
  modified_base 7: mod_base = OTHER; note = 2'-fluoroguanosine
  modified_base 8: mod_base = gm
  modified_base 9: mod_base = um
  modified_base 10: mod_base = OTHER; note = 2'-O-methyladenosine
  modified_base 11: mod_base = um
  modified_base 12: mod_base = OTHER; note = 2'-fluoroadenosine
  modified_base 13: mod_base = OTHER; note = 2'-O-methyladenosine
  modified_base 14: mod_base = OTHER; note = 2'-fluorocytidine
  modified_base 15: mod_base = cm
  modified_base 16: mod_base = OTHER; note = 2'-fluoroadenosine
  modified_base 17: mod_base = cm
  modified_base 18: mod_base = OTHER; note = 2'-O-methyladenosine
  modified_base 19: mod_base = gm
  modified_base 20: mod_base = cm
  modified_base 20^21: mod_base = OTHER; note = phosphorothioate linkage
  modified_base 21: mod_base = OTHER; note = 2'-O-methyladenosine
  source 1..21: mol_type = other RNA
ttagtaggtataaccacagca

SEQ ID NO: 141 - RNA, 21 nt, synthetic construct
  modified_base 1: mod_base = um
  modified_base 1^2: mod_base = OTHER; note = phosphorothioate linkage
  modified_base 2: mod_base = OTHER; note = 2'-fluorouridine
  modified_base 2^3: mod_base = OTHER; note = phosphorothioate linkage
  modified_base 3: mod_base = OTHER; note = 2'-fluoroadenosine
  modified_base 3^4: mod_base = OTHER; note = phosphorothioate linkage
  modified_base 4: mod_base = gm
  modified_base 5: mod_base = OTHER; note = 2'-fluorouridine
  modified_base 6: mod_base = OTHER; note = 2'-O-methyladenosine
  modified_base 7: mod_base = OTHER; note = 2'-fluoroguanosine
  modified_base 8: mod_base = gm
  modified_base 9: mod_base = um
  modified_base 10: mod_base = OTHER; note = 2'-O-methyladenosine
  modified_base 11: mod_base = um
  modified_base 12: mod_base = OTHER; note = 2'-fluoroadenosine
  modified_base 13: mod_base = OTHER; note = 2'-O-methyladenosine
  modified_base 14: mod_base = OTHER; note = 2'-fluorocytidine
  modified_base 15: mod_base = cm
  modified_base 16: mod_base = OTHER; note = 2'-fluoroadenosine
  modified_base 17: mod_base = cm
  modified_base 18: mod_base = OTHER; note = 2'-O-methyladenosine
  modified_base 19: mod_base = gm
  modified_base 20: mod_base = cm
  modified_base 20^21: mod_base = OTHER; note = phosphorothioate linkage
  modified_base 21: mod_base = OTHER; note = 2'-O-methyladenosine
  source 1..21: mol_type = other RNA
ttagtaggtataaccacagca

SEQ ID NO: 142 - RNA, 21 nt, synthetic construct
  modified_base 1: mod_base = um
  modified_base 1^2: mod_base = OTHER; note = phosphorothioate linkage
  modified_base 2: mod_base = OTHER; note = 2'-fluorouridine
  modified_base 2^3: mod_base = OTHER; note = phosphorothioate linkage
  modified_base 3: mod_base = OTHER; note = 2'-O-methyladenosine
  modified_base 3^4: mod_base = OTHER; note = phosphorothioate linkage
  modified_base 4: mod_base = OTHER; note = 2'-fluoroguanosine
  modified_base 5: mod_base = um
  modified_base 6: mod_base = OTHER; note = 2'-O-methyladenosine
  modified_base 7: mod_base = OTHER; note = 2'-fluoroguanosine
  modified_base 8: mod_base = gm
  modified_base 9: mod_base = OTHER; note = 2'-fluorouridine
  modified_base 10: mod_base = OTHER; note = 2'-O-methyladenosine
  modified_base 11: mod_base = um
  modified_base 12: mod_base = OTHER; note = 2'-fluoroadenosine
  modified_base 13: mod_base = OTHER; note = 2'-O-methyladenosine
  modified_base 14: mod_base = OTHER; note = 2'-fluorocytidine
  modified_base 15: mod_base = cm
  modified_base 16: mod_base = OTHER; note = 2'-fluoroadenosine
  modified_base 17: mod_base = cm
  modified_base 18: mod_base = OTHER; note = 2'-O-methyladenosine
  modified_base 19: mod_base = gm
  modified_base 20: mod_base = cm
  modified_base 20^21: mod_base = OTHER; note = phosphorothioate linkage
  modified_base 21: mod_base = OTHER; note = 2'-O-methyladenosine
  source 1..21: mol_type = other RNA
ttagtaggtataaccacagca

SEQ ID NO: 143 - RNA, 21 nt, synthetic construct
  modified_base 1: mod_base = um
  modified_base 1^2: mod_base = OTHER; note = phosphorothioate linkage
  modified_base 2: mod_base = OTHER; note = 2'-fluorouridine
  modified_base 2^3: mod_base = OTHER; note = phosphorothioate linkage
  modified_base 3: mod_base = OTHER; note = 2'-O-methyladenosine
  modified_base 3^4: mod_base = OTHER; note = phosphorothioate linkage
  modified_base 4: mod_base = gm
  modified_base 5: mod_base = OTHER; note = 2'-fluorouridine
  modified_base 6: mod_base = OTHER; note = 2'-O-methyladenosine
  modified_base 7: mod_base = OTHER; note = 2'-fluoroguanosine
  modified_base 8: mod_base = gm
  modified_base 9: mod_base = OTHER; note = 2'-fluorouridine
  modified_base 10: mod_base = OTHER; note = 2'-O-methyladenosine
  modified_base 11: mod_base = um
  modified_base 12: mod_base = OTHER; note = 2'-fluoroadenosine
  modified_base 13: mod_base = OTHER; note = 2'-O-methyladenosine
  modified_base 14: mod_base = OTHER; note = 2'-fluorocytidine
  modified_base 15: mod_base = cm
  modified_base 16: mod_base = OTHER; note = 2'-fluoroadenosine
  modified_base 17: mod_base = cm
  modified_base 18: mod_base = OTHER; note = 2'-O-methyladenosine
  modified_base 19: mod_base = gm
  modified_base 20: mod_base = cm
  modified_base 20^21: mod_base = OTHER; note = phosphorothioate linkage
  modified_base 21: mod_base = OTHER; note = 2'-O-methyladenosine
  source 1..21: mol_type = other RNA
ttagtaggtataaccacagca

SEQ ID NO: 144 - RNA, 21 nt, synthetic construct
  modified_base 1: mod_base = um
  modified_base 1^2: mod_base = OTHER; note = phosphorothioate linkage
  modified_base 2: mod_base = OTHER; note = 2'-fluorouridine
  modified_base 2^3: mod_base = OTHER; note = phosphorothioate linkage
  modified_base 3: mod_base = OTHER; note = 2'-O-methyladenosine
  modified_base 4: mod_base = OTHER; note = 2'-fluoroguanosine
  modified_base 5: mod_base = um
  modified_base 6: mod_base = OTHER; note = 2'-fluoroadenosine
  modified_base 7: mod_base = gm
  modified_base 8: mod_base = OTHER; note = 2'-fluoroguanosine
  modified_base 9: mod_base = um
  modified_base 10: mod_base = OTHER; note = 2'-fluoroadenosine
  modified_base 11: mod_base = um
  modified_base 12: mod_base = OTHER; note = 2'-fluoroadenosine
  modified_base 13: mod_base = OTHER; note = 2'-O-methyladenosine
  modified_base 14: mod_base = OTHER; note = 2'-fluorocytidine
  modified_base 15: mod_base = cm
  modified_base 16: mod_base = OTHER; note = 2'-fluoroadenosine
  modified_base 17: mod_base = cm
  modified_base 18: mod_base = OTHER; note = 2'-fluoroadenosine
  modified_base 19: mod_base = gm
  modified_base 20: mod_base = OTHER; note = 2'-fluorocytidine
  modified_base 20^21: mod_base = OTHER; note = phosphorothioate linkage
  modified_base 21: mod_base = OTHER; note = 2'-O-methyladenosine
  source 1..21: mol_type = other RNA
ttagtaggtataaccacagca

SEQ ID NO: 145 - RNA, 21 nt, synthetic construct
  modified_base 1: mod_base = OTHER; note = 5'-cyclopropyl phosphonate-2'-O-methyluridine
  modified_base 1^2: mod_base = OTHER; note = phosphorothioate linkage
  modified_base 2: mod_base = OTHER; note = 2'-fluorouridine
  modified_base 2^3: mod_base = OTHER; note = phosphorothioate linkage
  modified_base 3: mod_base = OTHER; note = 2'-O-methyladenosine
  modified_base 3^4: mod_base = OTHER; note = phosphorothioate linkage
  modified_base 4: mod_base = OTHER; note = 2'-fluoroguanosine
  modified_base 5: mod_base = um
  modified_base 6: mod_base = OTHER; note = 2'-fluoroadenosine
  modified_base 7: mod_base = gm
  modified_base 8: mod_base = gm
  modified_base 9: mod_base = um
  modified_base 10: mod_base = OTHER; note = 2'-O-methyladenosine
  modified_base 11: mod_base = um
  modified_base 12: mod_base = OTHER; note = 2'-fluoroadenosine
  modified_base 13: mod_base = OTHER; note = 2'-O-methyladenosine
  modified_base 14: mod_base = OTHER; note = 2'-fluorocytidine
  modified_base 15: mod_base = cm
  modified_base 16: mod_base = OTHER; note = 2'-fluoroadenosine
  modified_base 17: mod_base = cm
  modified_base 18: mod_base = OTHER; note = 2'-fluoroadenosine
  modified_base 19: mod_base = gm
  modified_base 20: mod_base = cm
  modified_base 20^21: mod_base = OTHER; note = phosphorothioate linkage
  modified_base 21: mod_base = OTHER; note = 2'-O-methyladenosine
  source 1..21: mol_type = other RNA
ttagtaggtataaccacagca

SEQ ID NO: 146 - RNA, 21 nt, synthetic construct
  modified_base 1: mod_base = OTHER; note = 5'-cyclopropyl phosphonate-2'-O-methyluridine
  modified_base 1^2: mod_base = OTHER; note = phosphorothioate linkage
  modified_base 2: mod_base = OTHER; note = 2'-fluorouridine
  modified_base 2^3: mod_base = OTHER; note = phosphorothioate linkage
  modified_base 3: mod_base = OTHER; note = 2'-O-methyladenosine
  modified_base 3^4: mod_base = OTHER; note = phosphorothioate linkage
  modified_base 4: mod_base = gm
  modified_base 5: mod_base = um
  modified_base 6: mod_base = OTHER; note = 2'-O-methyladenosine
  modified_base 7: mod_base = OTHER; note = 2'-fluoroguanosine
  modified_base 8: mod_base = gm
  modified_base 9: mod_base = um
  modified_base 10: mod_base = OTHER; note = 2'-O-methyladenosine
  modified_base 11: mod_base = um
  modified_base 12: mod_base = OTHER; note = 2'-fluoroadenosine
  modified_base 13: mod_base = OTHER; note = 2'-O-methyladenosine
  modified_base 14: mod_base = OTHER; note = 2'-fluorocytidine
  modified_base 15: mod_base = cm
  modified_base 16: mod_base = OTHER; note = 2'-fluoroadenosine
  modified_base 17: mod_base = cm
  modified_base 18: mod_base = OTHER; note = 2'-O-methyladenosine
  modified_base 19: mod_base = gm
  modified_base 20: mod_base = cm
  modified_base 20^21: mod_base = OTHER; note = phosphorothioate linkage
  modified_base 21: mod_base = OTHER; note = 2'-O-methyladenosine
  source 1..21: mol_type = other RNA
ttagtaggtataaccacagca

SEQ ID NO: 147 - RNA, 21 nt, synthetic construct
  modified_base 1: mod_base = um
  modified_base 1^2: mod_base = OTHER; note = phosphorothioate linkage
  modified_base 2: mod_base = OTHER; note = 2'-fluorouridine
  modified_base 2^3: mod_base = OTHER; note = phosphorothioate linkage
  modified_base 3: mod_base = OTHER; note = 2'-O-methyladenosine
  modified_base 3^4: mod_base = OTHER; note = phosphorothioate linkage
  modified_base 4: mod_base = OTHER; note = 2'-fluoroguanosine
  modified_base 5: mod_base = um
  modified_base 6: mod_base = OTHER; note = 2'-fluoroadenosine
  modified_base 7: mod_base = gm
  modified_base 8: mod_base = gm
  modified_base 9: mod_base = um
  modified_base 10: mod_base = OTHER; note = 2'-O-methyladenosine
  modified_base 11: mod_base = um
  modified_base 12: mod_base = OTHER; note = 2'-fluoroadenosine
  modified_base 13: mod_base = OTHER; note = 2'-O-methyladenosine
  modified_base 14: mod_base = OTHER; note = 2'-fluorocytidine
  modified_base 15: mod_base = cm
  modified_base 16: mod_base = OTHER; note = 2'-fluoroadenosine
  modified_base 17: mod_base = cm
  modified_base 18: mod_base = OTHER; note = 2'-fluoroadenosine
  modified_base 19: mod_base = gm
  modified_base 20: mod_base = cm
  modified_base 20^21: mod_base = OTHER; note = phosphorothioate linkage
  modified_base 21: mod_base = OTHER; note = 2'-O-methyladenosine
  source 1..21: mol_type = other RNA
ttagtaggtataaccacagca

SEQ ID NO: 148 - RNA, 21 nt, synthetic construct
  modified_base 1: mod_base = um
  modified_base 1^2: mod_base = OTHER; note = phosphorothioate linkage
  modified_base 2: mod_base = OTHER; note = 2'-fluorouridine
  modified_base 2^3: mod_base = OTHER; note = phosphorothioate linkage
  modified_base 3: mod_base = OTHER; note = 2'-O-methyladenosine
  modified_base 3^4: mod_base = OTHER; note = phosphorothioate linkage
  modified_base 4: mod_base = gm
  modified_base 5: mod_base = um
  modified_base 6: mod_base = OTHER; note = 2'-fluoroadenosine
  modified_base 7: mod_base = gm
  modified_base 8: mod_base = gm
  modified_base 9: mod_base = um
  modified_base 10: mod_base = OTHER; note = 2'-O-methyladenosine
  modified_base 11: mod_base = um
  modified_base 12: mod_base = OTHER; note = 2'-fluoroadenosine
  modified_base 13: mod_base = OTHER; note = 2'-O-methyladenosine
  modified_base 14: mod_base = OTHER; note = 2'-fluorocytidine
  modified_base 15: mod_base = cm
  modified_base 16: mod_base = OTHER; note = 2'-fluoroadenosine
  modified_base 17: mod_base = cm
  modified_base 18: mod_base = OTHER; note = 2'-O-methyladenosine
  modified_base 19: mod_base = gm
  modified_base 20: mod_base = cm
  modified_base 20^21: mod_base = OTHER; note = phosphorothioate linkage
  modified_base 21: mod_base = OTHER; note = 2'-O-methyladenosine
  source 1..21: mol_type = other RNA
ttagtaggtataaccacagca

SEQ ID NO: 149 - RNA, 21 nt, synthetic construct
  modified_base 1: mod_base = OTHER; note = 5'-cyclopropyl phosphonate-2'-O-methyluridine
  modified_base 1^2: mod_base = OTHER; note = phosphorothioate linkage
  modified_base 2: mod_base = OTHER; note = 2'-fluorouridine
  modified_base 2^3: mod_base = OTHER; note = phosphorothioate linkage
  modified_base 3: mod_base = OTHER; note = 2'-O-methyladenosine
  modified_base 3^4: mod_base = OTHER; note = phosphorothioate linkage
  modified_base 4: mod_base = gm
  modified_base 5: mod_base = um
  modified_base 6: mod_base = OTHER; note = 2'-fluoroadenosine
  modified_base 7: mod_base = gm
  modified_base 8: mod_base = gm
  modified_base 9: mod_base = um
  modified_base 10: mod_base = OTHER; note = 2'-O-methyladenosine
  modified_base 11: mod_base = um
  modified_base 12: mod_base = OTHER; note = 2'-fluoroadenosine
  modified_base 13: mod_base = OTHER; note = 2'-O-methyladenosine
  modified_base 14: mod_base = OTHER; note = 2'-fluorocytidine
  modified_base 15: mod_base = cm
  modified_base 16: mod_base = OTHER; note = 2'-fluoroadenosine
  modified_base 17: mod_base = cm
  modified_base 18: mod_base = OTHER; note = 2'-O-methyladenosine
  modified_base 19: mod_base = gm
  modified_base 20: mod_base = cm
  modified_base 20^21: mod_base = OTHER; note = phosphorothioate linkage
  modified_base 21: mod_base = OTHER; note = 2'-O-methyladenosine
  source 1..21: mol_type = other RNA
ttagtaggtataaccacagca

SEQ ID NO: 150 - RNA, 21 nt, synthetic construct
  modified_base 1: mod_base = OTHER; note = 5'-cyclopropyl phosphonate-2'-O-methyluridine
  modified_base 1^2: mod_base = OTHER; note = phosphorothioate linkage
  modified_base 2: mod_base = OTHER; note = 2'-fluorouridine
  modified_base 2^3: mod_base = OTHER; note = phosphorothioate linkage
  modified_base 3: mod_base = um
  modified_base 3^4: mod_base = OTHER; note = phosphorothioate linkage
  modified_base 4: mod_base = OTHER; note = 2'-fluoroguanosine
  modified_base 5: mod_base = um
  modified_base 6: mod_base = OTHER; note = 2'-fluoroadenosine
  modified_base 7: mod_base = OTHER; note = 2'-O-methyladenosine
  modified_base 8: mod_base = um
  modified_base 9: mod_base = cm
  modified_base 10: mod_base = OTHER; note = 2'-O-methyladenosine
  modified_base 11: mod_base = gm
  modified_base 12: mod_base = OTHER; note = 2'-fluorouridine
  modified_base 13: mod_base = um
  modified_base 14: mod_base = OTHER; note = 2'-fluorocytidine
  modified_base 15: mod_base = cm
  modified_base 16: mod_base = OTHER; note = 2'-fluorouridine
  modified_base 17: mod_base = um
  modified_base 18: mod_base = OTHER; note = 2'-fluoroguanosine
  modified_base 19: mod_base = um
  modified_base 20: mod_base = cm
  modified_base 20^21: mod_base = OTHER; note = phosphorothioate linkage
  modified_base 21: mod_base = cm
  source 1..21: mol_type = other RNA
tttgtaatcagttccttgtcc

SEQ ID NO: 151 - RNA, 21 nt, synthetic construct
  modified_base 1: mod_base = OTHER; note = 5'-cyclopropyl phosphonate-2'-O-methyluridine
  modified_base 1^2: mod_base = OTHER; note = phosphorothioate linkage
  modified_base 2: mod_base = OTHER; note = 2'-fluorouridine
  modified_base 3: mod_base = um
  modified_base 4: mod_base = OTHER; note = 2'-fluoroguanosine
  modified_base 5: mod_base = um
  modified_base 6: mod_base = OTHER; note = 2'-fluoroadenosine
  modified_base 7: mod_base = OTHER; note = 2'-O-methyladenosine
  modified_base 8: mod_base = um
  modified_base 9: mod_base = cm
  modified_base 10: mod_base = OTHER; note = 2'-O-methyladenosine
  modified_base 11: mod_base = gm
  modified_base 12: mod_base = OTHER; note = 2'-fluorouridine
  modified_base 13: mod_base = um
  modified_base 14: mod_base = OTHER; note = 2'-fluorocytidine
  modified_base 15: mod_base = cm
  modified_base 16: mod_base = OTHER; note = 2'-fluorouridine
  modified_base 17: mod_base = um
  modified_base 18: mod_base = OTHER; note = 2'-fluoroguanosine
  modified_base 19: mod_base = um
  modified_base 20: mod_base = cm
  modified_base 20^21: mod_base = OTHER; note = phosphorothioate linkage
  modified_base 21: mod_base = cm
  source 1..21: mol_type = other RNA
tttgtaatcagttccttgtcc

SEQ ID NO: 152 - RNA, 21 nt, synthetic construct
  modified_base 1: mod_base = OTHER; note = 5'-cyclopropyl phosphonate-2'-O-methyluridine
  modified_base 1^2: mod_base = OTHER; note = phosphorothioate linkage
  modified_base 2: mod_base = OTHER; note = 2'-fluorouridine
  modified_base 2^3: mod_base = OTHER; note = phosphorothioate linkage
  modified_base 3: mod_base = um
  modified_base 3^4: mod_base = OTHER; note = phosphorothioate linkage
  modified_base 4: mod_base = gm
  modified_base 5: mod_base = um
  modified_base 6: mod_base = OTHER; note = 2'-fluoroadenosine
  modified_base 7: mod_base = OTHER; note = 2'-O-methyladenosine
  modified_base 8: mod_base = um
  modified_base 9: mod_base = cm
  modified_base 10: mod_base = OTHER; note = 2'-O-methyladenosine
  modified_base 11: mod_base = gm
  modified_base 12: mod_base = OTHER; note = 2'-fluorouridine
  modified_base 13: mod_base = um
  modified_base 14: mod_base = OTHER; note = 2'-fluorocytidine
  modified_base 15: mod_base = cm
  modified_base 16: mod_base = OTHER; note = 2'-fluorouridine
  modified_base 17: mod_base = um
  modified_base 18: mod_base = gm
  modified_base 19: mod_base = um
  modified_base 20: mod_base = cm
  modified_base 20^21: mod_base = OTHER; note = phosphorothioate linkage
  modified_base 21: mod_base = cm
  source 1..21: mol_type = other RNA
tttgtaatcagttccttgtcc

SEQ ID NO: 153 - RNA, 21 nt, synthetic construct
  modified_base 1: mod_base = um
  modified_base 1^2: mod_base = OTHER; note = phosphorothioate linkage
  modified_base 2: mod_base = OTHER; note = 2'-fluorouridine
  modified_base 2^3: mod_base = OTHER; note = phosphorothioate linkage
  modified_base 3: mod_base = OTHER; note = 2'-O-methyladenosine
  modified_base 3^4: mod_base = OTHER; note = phosphorothioate linkage
  modified_base 4: mod_base = OTHER; note = 2'-fluoroguanosine
  modified_base 5: mod_base = um
  modified_base 6: mod_base = OTHER; note = 2'-O-methyladenosine
  modified_base 7: mod_base = gm
  modified_base 8: mod_base = gm
  modified_base 9: mod_base = um
  modified_base 10: mod_base = OTHER; note = 2'-O-methyladenosine
  modified_base 11: mod_base = um
  modified_base 12: mod_base = OTHER; note = 2'-fluoroadenosine
  modified_base 13: mod_base = OTHER; note = 2'-O-methyladenosine
  modified_base 14: mod_base = OTHER; note = 2'-fluorocytidine
  modified_base 15: mod_base = cm
  modified_base 16: mod_base = OTHER; note = 2'-fluoroadenosine
  modified_base 17: mod_base = cm
  modified_base 18: mod_base = OTHER; note = 2'-O-methyladenosine
  modified_base 19: mod_base = gm
  modified_base 20: mod_base = cm
  modified_base 20^21: mod_base = OTHER; note = phosphorothioate linkage
  modified_base 21: mod_base = OTHER; note = 2'-O-methyladenosine
  source 1..21: mol_type = other RNA
ttagtaggtataaccacagca

SEQ ID NO: 154 - RNA, 21 nt, synthetic construct
  modified_base 1: mod_base = OTHER; note = 5'-cyclopropyl phosphonate-2'-O-methyluridine
  modified_base 1^2: mod_base = OTHER; note = phosphorothioate linkage
  modified_base 2: mod_base = OTHER; note = 2'-fluorouridine
  modified_base 2^3: mod_base = OTHER; note = phosphorothioate linkage
  modified_base 3: mod_base = um
  modified_base 3^4: mod_base = OTHER; note = phosphorothioate linkage
  modified_base 4: mod_base = gm
  modified_base 5: mod_base = um
  modified_base 6: mod_base = OTHER; note = 2'-O-methyladenosine
  modified_base 7: mod_base = OTHER; note = 2'-fluoroadenosine
  modified_base 8: mod_base = um
  modified_base 9: mod_base = cm
  modified_base 10: mod_base = OTHER; note = 2'-O-methyladenosine
  modified_base 11: mod_base = gm
  modified_base 12: mod_base = OTHER; note = 2'-fluorouridine
  modified_base 13: mod_base = um
  modified_base 14: mod_base = OTHER; note = 2'-fluorocytidine
  modified_base 15: mod_base = cm
  modified_base 16: mod_base = OTHER; note = 2'-fluorouridine
  modified_base 17: mod_base = um
  modified_base 18: mod_base = gm
  modified_base 19: mod_base = um
  modified_base 20: mod_base = cm
  modified_base 20^21: mod_base = OTHER; note = phosphorothioate linkage
  modified_base 21: mod_base = cm
  source 1..21: mol_type = other RNA
tttgtaatcagttccttgtcc

SEQ ID NO: 155 - RNA, 21 nt, synthetic construct
  modified_base 1: mod_base = OTHER; note = 5'-cyclopropyl phosphonate-2'-O-methyluridine
  modified_base 1^2: mod_base = OTHER; note = phosphorothioate linkage
  modified_base 2: mod_base = OTHER; note = 2'-fluorouridine
  modified_base 2^3: mod_base = OTHER; note = phosphorothioate linkage
  modified_base 3: mod_base = um
  modified_base 4: mod_base = OTHER; note = 2'-fluoroguanosine
  modified_base 5: mod_base = um
  modified_base 6: mod_base = OTHER; note = 2'-O-methyladenosine
  modified_base 7: mod_base = OTHER; note = 2'-O-methyladenosine
  modified_base 8: mod_base = um
  modified_base 9: mod_base = cm
  modified_base 10: mod_base = OTHER; note = 2'-O-methyladenosine
  modified_base 11: mod_base = gm
  modified_base 12: mod_base = OTHER; note = 2'-fluorouridine
  modified_base 13: mod_base = um
  modified_base 14: mod_base = OTHER; note = 2'-fluorocytidine
  modified_base 15: mod_base = cm
  modified_base 16: mod_base = OTHER; note = 2'-fluorouridine
  modified_base 17: mod_base = um
  modified_base 18: mod_base = gm
  modified_base 19: mod_base = um
  modified_base 20: mod_base = cm
  modified_base 20^21: mod_base = OTHER; note = phosphorothioate linkage
  modified_base 21: mod_base = gm
  source 1..21: mol_type = other RNA
tttgtaatcagttccttgtcg

SEQ ID NO: 156 - RNA, 21 nt, synthetic construct
  modified_base 1: mod_base = um
  modified_base 1^2: mod_base = OTHER; note = phosphorothioate linkage
  modified_base 2: mod_base = OTHER; note = 2'-fluorouridine
  modified_base 2^3: mod_base = OTHER; note = phosphorothioate linkage
  modified_base 3: mod_base = OTHER; note = 2'-O-methyladenosine
  modified_base 3^4: mod_base = OTHER; note = phosphorothioate linkage
  modified_base 4: mod_base = gm
  modified_base 5: mod_base = OTHER; note = 2'-fluorouridine
  modified_base 6: mod_base = OTHER; note = 2'-O-methyladenosine
  modified_base 7: mod_base = gm
  modified_base 8: mod_base = gm
  modified_base 9: mod_base = um
  modified_base 10: mod_base = OTHER; note = 2'-O-methyladenosine
  modified_base 11: mod_base = um
  modified_base 12: mod_base = OTHER; note = 2'-fluoroadenosine
  modified_base 13: mod_base = OTHER; note = 2'-O-methyladenosine
  modified_base 14: mod_base = OTHER; note = 2'-fluorocytidine
  modified_base 15: mod_base = cm
  modified_base 16: mod_base = OTHER; note = 2'-fluoroadenosine
  modified_base 17: mod_base = cm
  modified_base 18: mod_base = OTHER; note = 2'-O-methyladenosine
  modified_base 19: mod_base = gm
  modified_base 20: mod_base = cm
  modified_base 20^21: mod_base = OTHER; note = phosphorothioate linkage
  modified_base 21: mod_base = OTHER; note = 2'-O-methyladenosine
  source 1..21: mol_type = other RNA
ttagtaggtataaccacagca

SEQ ID NO: 157 - RNA, 21 nt, synthetic construct
  modified_base 1: mod_base = OTHER; note = 5'-cyclopropyl phosphonate-2'-O-methyluridine
  modified_base 1^2: mod_base = OTHER; note = phosphorothioate linkage
  modified_base 2: mod_base = OTHER; note = 2'-fluorouridine
  modified_base 2^3: mod_base = OTHER; note = phosphorothioate linkage
  modified_base 3: mod_base = um
  modified_base 3^4: mod_base = OTHER; note = phosphorothioate linkage
  modified_base 4: mod_base = gm
  modified_base 5: mod_base = OTHER; note = 2'-fluorouridine
  modified_base 6: mod_base = OTHER; note = 2'-O-methyladenosine
  modified_base 7: mod_base = OTHER; note = 2'-O-methyladenosine
  modified_base 8: mod_base = um
  modified_base 9: mod_base = cm
  modified_base 10: mod_base = OTHER; note = 2'-O-methyladenosine
  modified_base 11: mod_base = gm
  modified_base 12: mod_base = OTHER; note = 2'-fluorouridine
  modified_base 13: mod_base = um
  modified_base 14: mod_base = OTHER; note = 2'-fluorocytidine
  modified_base 15: mod_base = cm
  modified_base 16: mod_base = OTHER; note = 2'-fluorouridine
  modified_base 17: mod_base = um
  modified_base 18: mod_base = gm
  modified_base 19: mod_base = um
  modified_base 20: mod_base = cm
  modified_base 20^21: mod_base = OTHER; note = phosphorothioate linkage
  modified_base 21: mod_base = cm
  source 1..21: mol_type = other RNA
tttgtaatcagttccttgtcc

SEQ ID NO: 158 - RNA, 21 nt, synthetic construct
  modified_base 1: mod_base = OTHER; note = 5'-cyclopropyl phosphonate-2'-O-methyluridine
  modified_base 1^2: mod_base = OTHER; note = phosphorothioate linkage
  modified_base 2: mod_base = OTHER; note = 2'-fluorouridine
  modified_base 2^3: mod_base = OTHER; note = phosphorothioate linkage
  modified_base 3: mod_base = um
  modified_base 3^4: mod_base = OTHER; note = phosphorothioate linkage
  modified_base 4: mod_base = OTHER; note = 2'-fluoroguanosine
  modified_base 5: mod_base = um
  modified_base 6: mod_base = OTHER; note = 2'-fluoroadenosine
  modified_base 7: mod_base = OTHER; note = 2'-O-methyladenosine
  modified_base 8: mod_base = um
  modified_base 9: mod_base = OTHER; note = 2'-fluorocytidine
  modified_base 10: mod_base = OTHER; note = 2'-O-methyladenosine
  modified_base 11: mod_base = gm
  modified_base 12: mod_base = OTHER; note = 2'-fluorouridine
  modified_base 13: mod_base = um
  modified_base 14: mod_base = OTHER; note = 2'-fluorocytidine
  modified_base 15: mod_base = cm
  modified_base 16: mod_base = OTHER; note = 2'-fluorouridine
  modified_base 17: mod_base = um
  modified_base 18: mod_base = gm
  modified_base 19: mod_base = um
  modified_base 20: mod_base = cm
  modified_base 20^21: mod_base = OTHER; note = phosphorothioate linkage
  modified_base 21: mod_base = cm
  source 1..21: mol_type = other RNA
tttgtaatcagttccttgtcc

SEQ ID NO: 159 - RNA, 21 nt, synthetic construct
  modified_base 1: mod_base = OTHER; note = 5'-cyclopropyl phosphonate-2'-O-methyluridine
  modified_base 1^2: mod_base = OTHER; note = phosphorothioate linkage
  modified_base 2: mod_base = OTHER; note = 2'-fluorouridine
  modified_base 2^3: mod_base = OTHER; note = phosphorothioate linkage
  modified_base 3: mod_base = um
  modified_base 3^4: mod_base = OTHER; note = phosphorothioate linkage
  modified_base 4: mod_base = OTHER; note = 2'-fluoroguanosine
  modified_base 5: mod_base = um
  modified_base 6: mod_base = OTHER; note = 2'-O-methyladenosine
  modified_base 7: mod_base = OTHER; note = 2'-fluoroadenosine
  modified_base 8: mod_base = um
  modified_base 9: mod_base = OTHER; note = 2'-fluorocytidine
  modified_base 10: mod_base = OTHER; note = 2'-O-methyladenosine
  modified_base 11: mod_base = gm
  modified_base 12: mod_base = OTHER; note = 2'-fluorouridine
  modified_base 13: mod_base = um
  modified_base 14: mod_base = OTHER; note = 2'-fluorocytidine
  modified_base 15: mod_base = cm
  modified_base 16: mod_base = OTHER; note = 2'-fluorouridine
  modified_base 17: mod_base = um
  modified_base 18: mod_base = gm
  modified_base 19: mod_base = um
  modified_base 20: mod_base = cm
  modified_base 20^21: mod_base = OTHER; note = phosphorothioate linkage
  modified_base 21: mod_base = cm
  source 1..21: mol_type = other RNA
tttgtaatcagttccttgtcc

SEQ ID NO: 160 - RNA, 21 nt, synthetic construct
  modified_base 1: mod_base = OTHER; note = 5'-cyclopropyl phosphonate-2'-O-methyluridine
  modified_base 1^2: mod_base = OTHER; note = phosphorothioate linkage
  modified_base 2: mod_base = OTHER; note = 2'-fluorouridine
  modified_base 2^3: mod_base = OTHER; note = phosphorothioate linkage
  modified_base 3: mod_base = OTHER; note = 2'-O-methyladenosine
  modified_base 3^4: mod_base = OTHER; note = phosphorothioate linkage
  modified_base 4: mod_base = gm
  modified_base 5: mod_base = OTHER; note = 2'-fluorouridine
  modified_base 6: mod_base = OTHER; note = 2'-O-methyladenosine
  modified_base 7: mod_base = OTHER; note = 2'-fluoroguanosine
  modified_base 8: mod_base = gm
  modified_base 9: mod_base = OTHER; note = 2'-fluorouridine
  modified_base 10: mod_base = OTHER; note = 2'-O-methyladenosine
  modified_base 11: mod_base = um
  modified_base 12: mod_base = OTHER; note = 2'-fluoroadenosine
  modified_base 13: mod_base = OTHER; note = 2'-O-methyladenosine
  modified_base 14: mod_base = OTHER; note = 2'-fluorocytidine
  modified_base 15: mod_base = cm
  modified_base 16: mod_base = OTHER; note = 2'-fluoroadenosine
  modified_base 17: mod_base = cm
  modified_base 18: mod_base = OTHER; note = 2'-O-methyladenosine
  modified_base 19: mod_base = gm
  modified_base 20: mod_base = cm
  modified_base 20^21: mod_base = OTHER; note = phosphorothioate linkage
  modified_base 21: mod_base = OTHER; note = 2'-O-methyladenosine
  source 1..21: mol_type = other RNA
ttagtaggtataaccacagca

SEQ ID NO: 161 - RNA, 21 nt, synthetic construct
  modified_base 1: mod_base = OTHER; note = 5'-cyclopropyl phosphonate-2'-O-methyluridine
  modified_base 1^2: mod_base = OTHER; note = phosphorothioate linkage
  modified_base 2: mod_base = OTHER; note = 2'-fluorouridine
  modified_base 2^3: mod_base = OTHER; note = phosphorothioate linkage
  modified_base 3: mod_base = um
  modified_base 3^4: mod_base = OTHER; note = phosphorothioate linkage
  modified_base 4: mod_base = gm
  modified_base 5: mod_base = OTHER; note = 2'-fluorouridine
  modified_base 6: mod_base = OTHER; note = 2'-O-methyladenosine
  modified_base 7: mod_base = OTHER; note = 2'-fluoroadenosine
  modified_base 8: mod_base = um
  modified_base 9: mod_base = OTHER; note = 2'-fluorocytidine
  modified_base 10: mod_base = OTHER; note = 2'-O-methyladenosine
  modified_base 11: mod_base = gm
  modified_base 12: mod_base = OTHER; note = 2'-fluorouridine
  modified_base 13: mod_base = um
  modified_base 14: mod_base = OTHER; note = 2'-fluorocytidine
  modified_base 15: mod_base = cm
  modified_base 16: mod_base = OTHER; note = 2'-fluorouridine
  modified_base 17: mod_base = um
  modified_base 18: mod_base = gm
  modified_base 19: mod_base = um
  modified_base 20: mod_base = cm
  modified_base 20^21: mod_base = OTHER; note = phosphorothioate linkage
  modified_base 21: mod_base = cm
  source 1..21: mol_type = other RNA
tttgtaatcagttccttgtcc

SEQ ID NO: 162 - RNA, 21 nt, synthetic construct
  modified_base 1: mod_base = OTHER; note = 5'-cyclopropyl phosphonate-2'-O-methyluridine
  modified_base 1^2: mod_base = OTHER; note = phosphorothioate linkage
  modified_base 2: mod_base = OTHER; note = 2'-fluorouridine
  modified_base 2^3: mod_base = OTHER; note = phosphorothioate linkage
  modified_base 3: mod_base = um
  modified_base 4: mod_base = OTHER; note = 2'-fluoroguanosine
  modified_base 5: mod_base = um
  modified_base 6: mod_base = OTHER; note = 2'-fluoroadenosine
  modified_base 7: mod_base = OTHER; note = 2'-O-methyladenosine
  modified_base 8: mod_base = OTHER; note = 2'-fluorouridine
  modified_base 9: mod_base = cm
  modified_base 10: mod_base = OTHER; note = 2'-fluoroadenosine
  modified_base 11: mod_base = gm
  modified_base 12: mod_base = OTHER; note = 2'-fluorouridine
  modified_base 13: mod_base = um
  modified_base 14: mod_base = OTHER; note = 2'-fluorocytidine
  modified_base 15: mod_base = cm
  modified_base 16: mod_base = OTHER; note = 2'-fluorouridine
  modified_base 17: mod_base = um
  modified_base 18: mod_base = OTHER; note = 2'-fluoroguanosine
  modified_base 19: mod_base = um
  modified_base 20: mod_base = OTHER; note = 2'-fluorocytidine
  modified_base 20^21: mod_base = OTHER; note = phosphorothioate linkage
  modified_base 21: mod_base = cm
  source 1..21: mol_type = other RNA
tttgtaatcagttccttgtcc

SEQ ID NO: 163 - RNA, 21 nt, synthetic construct
  modified_base 1: mod_base = OTHER; note = 5'-cyclopropyl phosphonate-2'-O-methyluridine
  modified_base 1^2: mod_base = OTHER; note = phosphorothioate linkage
  modified_base 2: mod_base = OTHER; note = 2'-fluorouridine
  modified_base 3: mod_base = OTHER; note = 2'-O-methyladenosine
  modified_base 4: mod_base = gm
  modified_base 5: mod_base = um
  modified_base 6: mod_base = OTHER; note = 2'-O-methyladenosine
  modified_base 7: mod_base = OTHER; note = 2'-fluoroguanosine
  modified_base 8: mod_base = gm
  modified_base 9: mod_base = um
  modified_base 10: mod_base = OTHER; note = 2'-O-methyladenosine
  modified_base 11: mod_base = um
  modified_base 12: mod_base = OTHER; note = 2'-fluoroadenosine
  modified_base 13: mod_base = OTHER; note = 2'-O-methyladenosine
  modified_base 14: mod_base = OTHER; note = 2'-fluorocytidine
  modified_base 15: mod_base = cm
  modified_base 16: mod_base = OTHER; note = 2'-fluoroadenosine
  modified_base 17: mod_base = cm
  modified_base 18: mod_base = OTHER; note = 2'-O-methyladenosine
  modified_base 19: mod_base = gm
  modified_base 20: mod_base = cm
  modified_base 20^21: mod_base = OTHER; note = phosphorothioate linkage
  modified_base 21: mod_base = OTHER; note = 2'-O-methyladenosine
  source 1..21: mol_type = other RNA
ttagtaggtataaccacagca

SEQ ID NO: 164 - RNA, 21 nt, synthetic construct
  modified_base 1: mod_base = OTHER; note = 5'-cyclopropyl phosphonate-2'-O-methyluridine
  modified_base 1^2: mod_base = OTHER; note = phosphorothioate linkage
  modified_base 2: mod_base = OTHER; note = 2'-fluorouridine
  modified_base 3: mod_base = um
  modified_base 4: mod_base = OTHER; note = 2'-fluoroguanosine
  modified_base 5: mod_base = um
  modified_base 6: mod_base = OTHER; note = 2'-O-methyladenosine
  modified_base 7: mod_base = OTHER; note = 2'-fluoroadenosine
  modified_base 8: mod_base = um
  modified_base 9: mod_base = OTHER; note = 2'-fluorocytidine
  modified_base 10: mod_base = OTHER; note = 2'-O-methyladenosine
  modified_base 11: mod_base = gm
  modified_base 12: mod_base = OTHER; note = 2'-fluorouridine
  modified_base 13: mod_base = um
  modified_base 14: mod_base = OTHER; note = 2'-fluorocytidine
  modified_base 15: mod_base = cm
  modified_base 16: mod_base = OTHER; note = 2'-fluorouridine
  modified_base 17: mod_base = um
  modified_base 18: mod_base = gm
  modified_base 19: mod_base = um
  modified_base 20: mod_base = cm
  modified_base 20^21: mod_base = OTHER; note = phosphorothioate linkage
  modified_base 21: mod_base = cm
  source 1..21: mol_type = other RNA
tttgtaatcagttccttgtcc

SEQ ID NO: 165 - RNA, 21 nt, synthetic construct
  modified_base 1: mod_base = gm
  modified_base 2: mod_base = OTHER; note = 2'-O-methyladenosine
  modified_base 3: mod_base = cm
  modified_base 4: mod_base = OTHER; note = 2'-O-methyladenosine
  modified_base 5: mod_base = cm
  modified_base 6: mod_base = OTHER; note = 2'-O-methyladenosine
  modified_base 7: mod_base = cm
  modified_base 8: mod_base = gm
  modified_base 9: mod_base = OTHER; note = 2'-fluorouridine
  modified_base 10: mod_base = OTHER; note = 2'-fluorocytidine
  modified_base 11: mod_base = OTHER; note = 2'-fluorocytidine
  modified_base 12: mod_base = OTHER; note = 2'-O-methyladenosine
  modified_base 13: mod_base = OTHER; note = 2'-O-methyladenosine
  modified_base 14: mod_base = cm
  modified_base 15: mod_base = um
  modified_base 16: mod_base = cm
  modified_base 17: mod_base = OTHER; note = 2'-O-methyladenosine
  modified_base 18: mod_base = gm
  modified_base 19: mod_base = um
  modified_base 20: mod_base = um
  modified_base 21: mod_base = um
  source 1..21: mol_type = other RNA
gacacacgtccaactcagttt

SEQ ID NO: 166 - RNA, 21 nt, synthetic construct
  modified_base 1: mod_base = gm
  modified_base 2: mod_base = gm
  modified_base 3: mod_base = OTHER; note = 2'-O-methyladenosine
  modified_base 4: mod_base = OTHER; note = 2'-O-methyladenosine
  modified_base 5: mod_base = gm
  modified_base 6: mod_base = OTHER; note = 2'-O-methyladenosine
  modified_base 7: mod_base = OTHER; note = 2'-O-methyladenosine
  modified_base 8: mod_base = gm
  modified_base 9: mod_base = OTHER; note = 2'-fluorouridine
  modified_base 10: mod_base = OTHER; note = 2'-fluoroadenosine
  modified_base 11: mod_base = OTHER; note = 2'-fluoroguanosine
  modified_base 12: mod_base = um
  modified_base 13: mod_base = gm
  modified_base 14: mod_base = gm
  modified_base 15: mod_base = OTHER; note = 2'-O-methyladenosine
  modified_base 16: mod_base = OTHER; note = 2'-O-methyladenosine
  modified_base 17: mod_base = OTHER; note = 2'-O-methyladenosine
  modified_base 18: mod_base = OTHER; note = 2'-O-methyladenosine
  modified_base 19: mod_base = um
  modified_base 20: mod_base = cm
  modified_base 21: mod_base = OTHER; note = 2'-O-methyladenosine
  source 1..21: mol_type = other RNA
ggaagaagtagtggaaaatca

SEQ ID NO: 167 - RNA, 21 nt, synthetic construct
  modified_base 1: mod_base = gm
  modified_base 2: mod_base = gm
  modified_base 3: mod_base = OTHER; note = 2'-O-methyladenosine
  modified_base 4: mod_base = OTHER; note = 2'-O-methyladenosine
  modified_base 5: mod_base = gm
  modified_base 6: mod_base = um
  modified_base 7: mod_base = OTHER; note = 2'-O-methyladenosine
  modified_base 8: mod_base = gm
  modified_base 9: mod_base = OTHER; note = 2'-fluorouridine
  modified_base 10: mod_base = OTHER; note = 2'-fluoroguanosine
  modified_base 11: mod_base = OTHER; note = 2'-fluoroguanosine
  modified_base 12: mod_base = OTHER; note = 2'-O-methyladenosine
  modified_base 13: mod_base = OTHER; note = 2'-O-methyladenosine
  modified_base 14: mod_base = OTHER; note = 2'-O-methyladenosine
  modified_base 15: mod_base = OTHER; note = 2'-O-methyladenosine
  modified_base 16: mod_base = um
  modified_base 17: mod_base = cm
  modified_base 18: mod_base = cm
  modified_base 19: mod_base = um
  modified_base 20: mod_base = OTHER; note = 2'-O-methyladenosine
  modified_base 21: mod_base = OTHER; note = 2'-O-methyladenosine
  source 1..21: mol_type = other RNA
ggaagtagtggaaaatcctaa

SEQ ID NO: 168 - RNA, 21 nt, synthetic construct
  modified_base 1: mod_base = gm
  modified_base 2: mod_base = um
  modified_base 3: mod_base = cm
  modified_base 4: mod_base = OTHER; note = 2'-O-methyladenosine
  modified_base 5: mod_base = um
  modified_base 6: mod_base = gm
  modified_base 7: mod_base = um
  modified_base 8: mod_base = gm
  modified_base 9: mod_base = OTHER; note = 2'-fluoroguanosine
  modified_base 10: mod_base = OTHER; note = 2'-fluorouridine
  modified_base 11: mod_base = OTHER; note = 2'-fluoroadenosine
  modified_base 12: mod_base = gm
  modified_base 13: mod_base = um
  modified_base 14: mod_base = gm
  modified_base 15: mod_base = um
  modified_base 16: mod_base = um
  modified_base 17: mod_base = OTHER; note = 2'-O-methylinosine
  modified_base 18: mod_base = gm
  modified_base 19: mod_base = um
  modified_base 20: mod_base = um
  modified_base 21: mod_base = um
  source 1..21: mol_type = other RNA
gtcatgtggtagtgttngttt

SEQ ID NO: 169 - RNA, 21 nt, synthetic construct
  modified_base 1: mod_base = cm
  modified_base 2: mod_base = OTHER; note = 2'-O-methyladenosine
  modified_base 3: mod_base = OTHER; note = 2'-O-methyladenosine
  modified_base 4: mod_base = gm
  modified_base 5: mod_base = cm
  modified_base 6: mod_base = um
  modified_base 7: mod_base = OTHER; note = 2'-O-methyladenosine
  modified_base 8: mod_base = um
  modified_base 9: mod_base = OTHER; note = 2'-fluoroguanosine
  modified_base 10: mod_base = OTHER; note = 2'-fluoroadenosine
  modified_base 11: mod_base = OTHER; note = 2'-fluorocytidine
  modified_base 12: mod_base = cm
  modified_base 13: mod_base = cm
  modified_base 14: mod_base = OTHER; note = 2'-O-methyladenosine
  modified_base 15: mod_base = OTHER; note = 2'-O-methyladenosine
  modified_base 16: mod_base = OTHER; note = 2'-O-methyladenosine
  modified_base 17: mod_base = um
  modified_base 18: mod_base = gm
  modified_base 19: mod_base = um
  modified_base 20: mod_base = OTHER; note = 2'-O-methyladenosine
  modified_base 21: mod_base = um
  source 1..21: mol_type = other RNA
caagctatgacccaaatgtat

SEQ ID NO: 170 - RNA, 21 nt, synthetic construct
  modified_base 1: mod_base = gm
  modified_base 2: mod_base = OTHER; note = 2'-O-methyladenosine
  modified_base 3: mod_base = cm
  modified_base 4: mod_base = OTHER; note = 2'-O-methyladenosine
  modified_base 5: mod_base = um
  modified_base 6: mod_base = gm
  modified_base 7: mod_base = gm
  modified_base 8: mod_base = um
  modified_base 9: mod_base = OTHER; note = 2'-fluoroadenosine
  modified_base 10: mod_base = OTHER; note = 2'-fluorocytidine
  modified_base 11: mod_base = OTHER; note = 2'-fluorocytidine
  modified_base 12: mod_base = OTHER; note = 2'-O-methyladenosine
  modified_base 13: mod_base = cm
  modified_base 14: mod_base = OTHER; note = 2'-O-methyladenosine
  modified_base 15: mod_base = um
  modified_base 16: mod_base = OTHER; note = 2'-O-methyladenosine
  modified_base 17: mod_base = um
  modified_base 18: mod_base = OTHER; note = 2'-O-methyladenosine
  modified_base 19: mod_base = um
  modified_base 20: mod_base = cm
  modified_base 21: mod_base = OTHER; note = 2'-O-methyladenosine
  source 1..21: mol_type = other RNA
gacatggtaccacatatatca

SEQ ID NO: 171 - RNA, 21 nt, synthetic construct
  modified_base 1: mod_base = gm
  modified_base 2: mod_base = cm
  modified_base 3: mod_base = OTHER; note = 2'-O-methyladenosine
  modified_base 4: mod_base = um
  modified_base 5: mod_base = gm
  modified_base 6: mod_base = gm
  modified_base 7: mod_base = um
  modified_base 8: mod_base = OTHER; note = 2'-O-methyladenosine
  modified_base 9: mod_base = OTHER; note = 2'-fluorocytidine
  modified_base 10: mod_base = OTHER; note = 2'-fluorocytidine
  modified_base 11: mod_base = OTHER; note = 2'-fluoroadenosine
  modified_base 12: mod_base = cm
  modified_base 13: mod_base = OTHER; note = 2'-O-methyladenosine
  modified_base 14: mod_base = um
  modified_base 15: mod_base = OTHER; note = 2'-O-methyladenosine
  modified_base 16: mod_base = um
  modified_base 17: mod_base = OTHER; note = 2'-O-methyladenosine
  modified_base 18: mod_base = um
  modified_base 19: mod_base = cm
  modified_base 20: mod_base = OTHER; note = 2'-O-methyladenosine
  modified_base 21: mod_base = OTHER; note = 2'-O-methyladenosine
  source 1..21: mol_type = other RNA
gcatggtaccacatatatcaa

SEQ ID NO: 172 - RNA, 21 nt, synthetic construct
  modified_base 1: mod_base = gm
  modified_base 2: mod_base = gm
  modified_base 3: mod_base = um
  modified_base 4: mod_base = OTHER; note = 2'-O-methyladenosine
  modified_base 5: mod_base = cm
  modified_base 6: mod_base = OTHER; note = 2'-O-methyladenosine
  modified_base 7: mod_base = um
  modified_base 8: mod_base = OTHER; note = 2'-O-methyladenosine
  modified_base 9: mod_base = OTHER; note = 2'-fluoroadenosine
  modified_base 10: mod_base = OTHER; note = 2'-fluorouridine
  modified_base 11: mod_base = OTHER; note = 2'-fluorocytidine
  modified_base 12: mod_base = OTHER; note = 2'-O-methyladenosine
  modified_base 13: mod_base = gm
  modified_base 14: mod_base = gm
  modified_base 15: mod_base = OTHER; note = 2'-O-methyladenosine
  modified_base 16: mod_base = um
  modified_base 17: mod_base = gm
  modified_base 18: mod_base = um
  modified_base 19: mod_base = OTHER; note = 2'-O-methyladenosine
  modified_base 20: mod_base = OTHER; note = 2'-O-methyladenosine
  modified_base 21: mod_base = OTHER; note = 2'-O-methyladenosine
  source 1..21: mol_type = other RNA
ggtacataatcaggatgtaaa

SEQ ID NO: 173 - RNA, 21 nt, synthetic construct
  modified_base 1: mod_base = gm
  modified_base 2: mod_base = cm
  modified_base 3: mod_base = OTHER; note = 2'-O-methyladenosine
  modified_base 4: mod_base = um
  modified_base 5: mod_base = OTHER; note = 2'-O-methyladenosine
  modified_base 6: mod_base = OTHER; note = 2'-O-methyladenosine
  modified_base 7: mod_base = um
  modified_base 8: mod_base = cm
  modified_base 9: mod_base = OTHER; note = 2'-fluoroadenosine
  modified_base 10: mod_base = OTHER; note = 2'-fluoroguanosine
  modified_base 11: mod_base = OTHER; note = 2'-fluoroguanosine
  modified_base 12: mod_base = OTHER; note = 2'-O-methyladenosine
  modified_base 13: mod_base = um
  modified_base 14: mod_base = gm
  modified_base 15: mod_base = um
  modified_base 16: mod_base = OTHER; note = 2'-O-methyladenosine
  modified_base 17: mod_base = OTHER; note = 2'-O-methyladenosine
  modified_base 18: mod_base = OTHER; note = 2'-O-methyladenosine
  modified_base 19: mod_base = cm
  modified_base 20: mod_base = um
  modified_base 21: mod_base = um
  source 1..21: mol_type = other RNA
gcataatcaggatgtaaactt

SEQ ID NO: 174 - RNA, 21 nt, synthetic construct
  modified_base 1: mod_base = cm
  modified_base 2: mod_base = OTHER; note = 2'-O-methyl-2-aminoadenosine
  modified_base 3: mod_base = um
  modified_base 4: mod_base = OTHER; note = 2'-O-methyladenosine
  modified_base 5: mod_base = OTHER; note = 2'-O-methyladenosine
  modified_base 6: mod_base = um
  modified_base 7: mod_base = cm
  modified_base 8: mod_base = OTHER; note = 2'-O-methyladenosine
  modified_base 9: mod_base = OTHER; note = 2'-fluoroguanosine
  modified_base 10: mod_base = OTHER; note = 2'-fluoroguanosine
  modified_base 11: mod_base = OTHER; note = 2'-fluoroadenosine
  modified_base 12: mod_base = um
  modified_base 13: mod_base = gm
  modified_base 14: mod_base = um
  modified_base 15: mod_base = OTHER; note = 2'-O-methyladenosine
  modified_base 16: mod_base = OTHER; note = 2'-O-methyladenosine
  modified_base 17: mod_base = OTHER; note = 2'-O-methyladenosine
  modified_base 18: mod_base = cm
  modified_base 19: mod_base = um
  modified_base 20: mod_base = um
  modified_base 21: mod_base = OTHER; note = 2'-O-methyladenosine
  source 1..21: mol_type = other RNA
cntaatcaggatgtaaactta

SEQ ID NO: 175 - RNA, 21 nt, synthetic construct
  modified_base 1: mod_base = gm
  modified_base 2: mod_base = gm
  modified_base 3: mod_base = OTHER; note = 2'-O-methyladenosine
  modified_base 4: mod_base = um
  modified_base 5: mod_base = gm
  modified_base 6: mod_base = um
  modified_base 7: mod_base = OTHER; note = 2'-O-methyladenosine
  modified_base 8: mod_base = OTHER; note = 2'-O-methyladenosine
  modified_base 9: mod_base = OTHER; note = 2'-fluoroadenosine
  modified_base 10: mod_base = OTHER; note = 2'-fluorocytidine
  modified_base 11: mod_base = OTHER; note = 2'-fluorouridine
  modified_base 12: mod_base = um
  modified_base 13: mod_base = OTHER; note = 2'-O-methyladenosine
  modified_base 14: mod_base = cm
  modified_base 15: mod_base = OTHER; note = 2'-O-methyladenosine
  modified_base 16: mod_base = um
  modified_base 17: mod_base = OTHER; note = 2'-O-methyladenosine
  modified_base 18: mod_base = gm
  modified_base 19: mod_base = cm
  modified_base 20: mod_base = um
  modified_base 21: mod_base = OTHER; note = 2'-O-methyladenosine
  source 1..21: mol_type = other RNA
ggatgtaaacttacatagcta

SEQ ID NO: 176 - RNA, 21 nt, synthetic construct
  modified_base 1: mod_base = gm
  modified_base 2: mod_base = gm
  modified_base 3: mod_base = um
  modified_base 4: mod_base = OTHER; note = 2'-O-methyladenosine
  modified_base 5: mod_base = OTHER; note = 2'-O-methyladenosine
  modified_base 6: mod_base = gm
  modified_base 7: mod_base = gm
  modified_base 8: mod_base = cm
  modified_base 9: mod_base = OTHER; note = 2'-fluorouridine
  modified_base 10: mod_base = OTHER; note = 2'-fluoroadenosine
  modified_base 11: mod_base = OTHER; note = 2'-fluoroguanosine
  modified_base 12: mod_base = OTHER; note = 2'-O-methyladenosine
  modified_base 13: mod_base = cm
  modified_base 14: mod_base = um
  modified_base 15: mod_base = um
  modified_base 16: mod_base = um
  modified_base 17: mod_base = OTHER; note = 2'-O-methyladenosine
  modified_base 18: mod_base = um
  modified_base 19: mod_base = um
  modified_base 20: mod_base = OTHER; note = 2'-O-methyl-2-aminoadenosine
  modified_base 21: mod_base = um
  source 1..21: mol_type = other RNA
ggtaaggctagactttattnt

SEQ ID NO: 177 - RNA, 21 nt, synthetic construct
  modified_base 1: mod_base = um
  modified_base 2: mod_base = gm
  modified_base 3: mod_base = gm
  modified_base 4: mod_base = um
  modified_base 5: mod_base = gm
  modified_base 6: mod_base = um
  modified_base 7: mod_base = cm
  modified_base 8: mod_base = um
  modified_base 9: mod_base = OTHER; note = 2'-fluorocytidine
  modified_base 10: mod_base = OTHER; note = 2'-fluorouridine
  modified_base 11: mod_base = OTHER; note = 2'-fluoroadenosine
  modified_base 12: mod_base = um
  modified_base 13: mod_base = cm
  modified_base 14: mod_base = um
  modified_base 15: mod_base = gm
  modified_base 16: mod_base = um
  modified_base 17: mod_base = OTHER; note = 2'-O-methyladenosine
  modified_base 18: mod_base = gm
  modified_base 19: mod_base = um
  modified_base 20: mod_base = OTHER; note = 2'-O-methyladenosine
  modified_base 21: mod_base = OTHER; note = 2'-O-methyladenosine
  source 1..21: mol_type = other RNA
tggtgtctctatctgtagtaa

SEQ ID NO: 178 - RNA, 21 nt, synthetic construct
  modified_base 1: mod_base = gm
  modified_base 2: mod_base = um
  modified_base 3: mod_base = cm
  modified_base 4: mod_base = um
  modified_base 5: mod_base = cm
  modified_base 6: mod_base = um
  modified_base 7: mod_base = OTHER; note = 2'-O-methyladenosine
  modified_base 8: mod_base = um
  modified_base 9: mod_base = OTHER; note = 2'-fluorocytidine
  modified_base 10: mod_base = OTHER; note = 2'-fluorouridine
  modified_base 11: mod_base = OTHER; note = 2'-fluoroguanosine
  modified_base 12: mod_base = um
  modified_base 13: mod_base = OTHER; note = 2'-O-methyladenosine
  modified_base 14: mod_base = gm
  modified_base 15: mod_base = um
  modified_base 16: mod_base = OTHER; note = 2'-O-methyladenosine
  modified_base 17: mod_base = cm
  modified_base 18: mod_base = um
  modified_base 19: mod_base = OTHER; note = 2'-O-methyladenosine
  modified_base 20: mod_base = um
  modified_base 21: mod_base = OTHER; note = 2'-O-methyladenosine
  source 1..21: mol_type = other RNA
gtctctatctgtagtactata

SEQ ID NO: 179 - RNA, 21 nt, synthetic construct
  modified_base 1: mod_base = gm
  modified_base 2: mod_base = cm
  modified_base 3: mod_base = um
  modified_base 4: mod_base = cm
  modified_base 5: mod_base = um
  modified_base 6: mod_base = OTHER; note = 2'-O-methyladenosine
  modified_base 7: mod_base = um
  modified_base 8: mod_base = cm
  modified_base 9: mod_base = OTHER; note = 2'-fluorouridine
  modified_base 10: mod_base = OTHER; note = 2'-fluoroguanosine
  modified_base 11: mod_base = OTHER; note = 2'-fluorouridine
  modified_base 12: mod_base = OTHER; note = 2'-O-methyladenosine
  modified_base 13: mod_base = gm
  modified_base 14: mod_base = um
  modified_base 15: mod_base = OTHER; note = 2'-O-methyladenosine
  modified_base 16: mod_base = cm
  modified_base 17: mod_base = um
  modified_base 18: mod_base = OTHER; note = 2'-O-methyladenosine
  modified_base 19: mod_base = um
  modified_base 20: mod_base = gm
  modified_base 21: mod_base = OTHER; note = 2'-O-methyladenosine
  source 1..21: mol_type = other RNA
gctctatctgtagtactatga

SEQ ID NO: 180 - RNA, 21 nt, synthetic construct
  modified_base 1: mod_base = gm
  modified_base 2: mod_base = cm
  modified_base 3: mod_base = um
  modified_base 4: mod_base = OTHER; note = 2'-O-methyladenosine
  modified_base 5: mod_base = um
  modified_base 6: mod_base = cm
  modified_base 7: mod_base = um
  modified_base 8: mod_base = gm
  modified_base 9: mod_base = OTHER; note = 2'-fluorouridine
  modified_base 10: mod_base = OTHER; note = 2'-fluoroadenosine
  modified_base 11: mod_base = OTHER; note = 2'-fluoroguanosine
  modified_base 12: mod_base = um
  modified_base 13: mod_base = OTHER; note = 2'-O-methyladenosine
  modified_base 14: mod_base = cm
  modified_base 15: mod_base = um
  modified_base 16: mod_base = OTHER; note = 2'-O-methyladenosine
  modified_base 17: mod_base = um
  modified_base 18: mod_base = gm
  modified_base 19: mod_base = OTHER; note = 2'-O-methyladenosine
  modified_base 20: mod_base = cm
  modified_base 21: mod_base = OTHER; note = 2'-O-methyladenosine
  source 1..21: mol_type = other RNA
gctatctgtagtactatgaca

SEQ ID NO: 181 - RNA, 21 nt, synthetic construct
  modified_base 1: mod_base = gm
  modified_base 2: mod_base = um
  modified_base 3: mod_base = cm
  modified_base 4: mod_base = um
  modified_base 5: mod_base = OTHER; note = 2'-O-methyladenosine
  modified_base 6: mod_base = gm
  modified_base 7: mod_base = cm
  modified_base 8: mod_base = OTHER; note = 2'-O-methyladenosine
  modified_base 9: mod_base = OTHER; note = 2'-fluoroadenosine
  modified_base 10: mod_base = OTHER; note = 2'-fluorouridine
  modified_base 11: mod_base = OTHER; note = 2'-fluoroguanosine
  modified_base 12: mod_base = um
  modified_base 13: mod_base = um
  modified_base 14: mod_base = gm
  modified_base 15: mod_base = cm
  modified_base 16: mod_base = OTHER; note = 2'-O-methyladenosine
  modified_base 17: mod_base = OTHER; note = 2'-O-methyladenosine
  modified_base 18: mod_base = OTHER; note = 2'-O-methyl-2-aminoadenosine
  modified_base 19: mod_base = um
  modified_base 20: mod_base = um
  modified_base 21: mod_base = OTHER; note = 2'-O-methyladenosine
  source 1..21: mol_type = other RNA
gtctagcaatgttgcaantta

SEQ ID NO: 182 - RNA, 21 nt, synthetic construct
  modified_base 1: mod_base = gm
  modified_base 2: mod_base = OTHER; note = 2'-O-methyl-2-aminoadenosine
  modified_base 3: mod_base = OTHER; note = 2'-O-methyladenosine
  modified_base 4: mod_base = gm
  modified_base 5: mod_base = OTHER; note = 2'-O-methyladenosine
  modified_base 6: mod_base = cm
  modified_base 7: mod_base = um
  modified_base 8: mod_base = cm
  modified_base 9: mod_base = OTHER; note = 2'-fluoroadenosine
  modified_base 10: mod_base = OTHER; note = 2'-fluorouridine
  modified_base 11: mod_base = OTHER; note = 2'-fluorocytidine
  modified_base 12: mod_base = um
  modified_base 13: mod_base = cm
  modified_base 14: mod_base = um
  modified_base 15: mod_base = OTHER; note = 2'-O-methyladenosine
  modified_base 16: mod_base = um
  modified_base 17: mod_base = gm
  modified_base 18: mod_base = OTHER; note = 2'-O-methyladenosine
  modified_base 19: mod_base = um
  modified_base 20: mod_base = gm
  modified_base 21: mod_base = OTHER; note = 2'-O-methyladenosine
  source 1..21: mol_type = other RNA
gnagactcatctctatgatga

SEQ ID NO: 183 - RNA, 21 nt, synthetic construct
  modified_base 1: mod_base = gm
  modified_base 2: mod_base = um
  modified_base 3: mod_base = gm
  modified_base 4: mod_base = gm
  modified_base 5: mod_base = OTHER; note = 2'-O-methyladenosine
  modified_base 6: mod_base = gm
  modified_base 7: mod_base = um
  modified_base 8: mod_base = cm
  modified_base 9: mod_base = OTHER; note = 2'-fluoroadenosine
  modified_base 10: mod_base = OTHER; note = 2'-fluorocytidine
  modified_base 11: mod_base = OTHER; note = 2'-fluoroadenosine
  modified_base 12: mod_base = um
  modified_base 13: mod_base = um
  modified_base 14: mod_base = OTHER; note = 2'-O-methyladenosine
  modified_base 15: mod_base = OTHER; note = 2'-O-methyladenosine
  modified_base 16: mod_base = um
  modified_base 17: mod_base = um
  modified_base 18: mod_base = gm
  modified_base 19: mod_base = gm
  modified_base 20: mod_base = OTHER; note = 2'-O-methyladenosine
  modified_base 21: mod_base = OTHER; note = 2'-O-methyladenosine
  source 1..21: mol_type = other RNA
gtggagtcacattaattggaa

SEQ ID NO: 184 - RNA, 21 nt, synthetic construct
  modified_base 1: mod_base = gm
  modified_base 2: mod_base = gm
  modified_base 3: mod_base = OTHER; note = 2'-O-methyladenosine
  modified_base 4: mod_base = um
  modified_base 5: mod_base = gm
  modified_base 6: mod_base = OTHER; note = 2'-O-methyladenosine
  modified_base 7: mod_base = gm
  modified_base 8: mod_base = um
  modified_base 9: mod_base = OTHER; note = 2'-fluoroadenosine
  modified_base 10: mod_base = OTHER; note = 2'-fluorocytidine
  modified_base 11: mod_base = OTHER; note = 2'-fluoroguanosine
  modified_base 12: mod_base = OTHER; note = 2'-O-methyladenosine
  modified_base 13: mod_base = OTHER; note = 2'-O-methyladenosine
  modified_base 14: mod_base = cm
  modified_base 15: mod_base = um
  modified_base 16: mod_base = um
  modified_base 17: mod_base = OTHER; note = 2'-O-methyladenosine
  modified_base 18: mod_base = um
  modified_base 19: mod_base = gm
  modified_base 20: mod_base = um
  modified_base 21: mod_base = OTHER; note = 2'-O-methyladenosine
  source 1..21: mol_type = other RNA
ggatgagtacgaacttatgta

SEQ ID NO: 185 - RNA, 21 nt, synthetic construct
  modified_base 1: mod_base = OTHER; note = 2'-O-methyladenosine
  modified_base 2: mod_base = cm
  modified_base 3: mod_base = gm
  modified_base 4: mod_base = OTHER; note = 2'-O-methyladenosine
  modified_base 5: mod_base = OTHER; note = 2'-O-methyladenosine
  modified_base 6: mod_base = cm
  modified_base 7: mod_base = um
  modified_base 8: mod_base = um
  modified_base 9: mod_base = OTHER; note = 2'-fluoroadenosine
  modified_base 10: mod_base = OTHER; note = 2'-fluorouridine
  modified_base 11: mod_base = OTHER; note = 2'-fluoroguanosine
  modified_base 12: mod_base = um
  modified_base 13: mod_base = OTHER; note = 2'-O-methyladenosine
  modified_base 14: mod_base = cm
  modified_base 15: mod_base = um
  modified_base 16: mod_base = cm
  modified_base 17: mod_base = OTHER; note = 2'-O-methyladenosine
  modified_base 18: mod_base = um
  modified_base 19: mod_base = um
  modified_base 20: mod_base = cm
  modified_base 21: mod_base = OTHER; note = 2'-O-methyladenosine
  source 1..21: mol_type = other RNA
acgaacttatgtactcattca

SEQ ID NO: 186 - RNA, 21 nt, synthetic construct
  modified_base 1: mod_base = cm
  modified_base 2: mod_base = gm
  modified_base 3: mod_base = OTHER; note = 2'-O-methyladenosine
  modified_base 4: mod_base = OTHER; note = 2'-O-methyladenosine
  modified_base 5: mod_base = cm
  modified_base 6: mod_base = um
  modified_base 7: mod_base = um
  modified_base 8: mod_base = OTHER; note = 2'-O-methyladenosine
  modified_base 9: mod_base = OTHER; note = 2'-fluorouridine
  modified_base 10: mod_base = OTHER; note = 2'-fluoroguanosine
  modified_base 11: mod_base = OTHER; note = 2'-fluorouridine
  modified_base 12: mod_base = OTHER; note = 2'-O-methyladenosine
  modified_base 13: mod_base = cm
  modified_base 14: mod_base = um
  modified_base 15: mod_base = cm
  modified_base 16: mod_base = OTHER; note = 2'-O-methyladenosine
  modified_base 17: mod_base = um
  modified_base 18: mod_base = um
  modified_base 19: mod_base = cm
  modified_base 20: mod_base = gm
  modified_base 21: mod_base = um
  source 1..21: mol_type = other RNA
cgaacttatgtactcattcgt

SEQ ID NO: 187 - RNA, 21 nt, synthetic construct
  modified_base 1: mod_base = cm
  modified_base 2: mod_base = um
  modified_base 3: mod_base = um
  modified_base 4: mod_base = OTHER; note = 2'-O-methyladenosine
  modified_base 5: mod_base = um
  modified_base 6: mod_base = gm
  modified_base 7: mod_base = um
  modified_base 8: mod_base = OTHER; note = 2'-O-methyladenosine
  modified_base 9: mod_base = OTHER; note = 2'-fluorocytidine
  modified_base 10: mod_base = OTHER; note = 2'-fluorouridine
  modified_base 11: mod_base = OTHER; note = 2'-fluorocytidine
  modified_base 12: mod_base = OTHER; note = 2'-O-methyladenosine
  modified_base 13: mod_base = um
  modified_base 14: mod_base = um
  modified_base 15: mod_base = cm
  modified_base 16: mod_base = gm
  modified_base 17: mod_base = um
  modified_base 18: mod_base = um
  modified_base 19: mod_base = um
  modified_base 20: mod_base = cm
  modified_base 21: mod_base = OTHER; note = 2'-O-methyladenosine
  source 1..21: mol_type = other RNA
cttatgtactcattcgtttca

SEQ ID NO: 188 - RNA, 21 nt, synthetic construct
  modified_base 1: mod_base = cm
  modified_base 2: mod_base = um
  modified_base 3: mod_base = um
  modified_base 4: mod_base = OTHER; note = 2'-O-methyladenosine
  modified_base 5: mod_base = um
  modified_base 6: mod_base = gm
  modified_base 7: mod_base = um
  modified_base 8: mod_base = OTHER; note = 2'-O-methyladenosine
  modified_base 9: mod_base = OTHER; note = 2'-fluorocytidine
  modified_base 10: mod_base = OTHER; note = 2'-fluorouridine
  modified_base 11: mod_base = OTHER; note = 2'-fluorocytidine
  modified_base 12: mod_base = OTHER; note = 2'-O-methyladenosine
  modified_base 13: mod_base = um
  modified_base 14: mod_base = um
  modified_base 15: mod_base = cm
  modified_base 16: mod_base = OTHER; note = 2'-O-methylinosine
  modified_base 17: mod_base = um
  modified_base 18: mod_base = um
  modified_base 19: mod_base = um
  modified_base 20: mod_base = cm
  modified_base 21: mod_base = OTHER; note = 2'-O-methyladenosine
  source 1..21: mol_type = other RNA
cttatgtactcattcntttca

SEQ ID NO: 189 - RNA, 21 nt, synthetic construct
  modified_base 1: mod_base = gm
  modified_base 2: mod_base = um
  modified_base 3: mod_base = OTHER; note = 2'-O-methyladenosine
  modified_base 4: mod_base = gm
  modified_base 5: mod_base = um
  modified_base 6: mod_base = um
  modified_base 7: mod_base = OTHER; note = 2'-O-methyladenosine
  modified_base 8: mod_base = OTHER; note = 2'-O-methyladenosine
  modified_base 9: mod_base = OTHER; note = 2'-fluorouridine
  modified_base 10: mod_base = OTHER; note = 2'-fluoroadenosine
  modified_base 11: mod_base = OTHER; note = 2'-fluoroguanosine
  modified_base 12: mod_base = cm
  modified_base 13: mod_base = gm
  modified_base 14: mod_base = um
  modified_base 15: mod_base = OTHER; note = 2'-O-methyladenosine
  modified_base 16: mod_base = cm
  modified_base 17: mod_base = um
  modified_base 18: mod_base = um
  modified_base 19: mod_base = cm
  modified_base 20: mod_base = um
  modified_base 21: mod_base = um
  source 1..21: mol_type = other RNA
gtagttaatagcgtacttctt

SEQ ID NO: 190 - RNA, 21 nt, synthetic construct
  modified_base 1: mod_base = gm
  modified_base 2: mod_base = cm
  modified_base 3: mod_base = um
  modified_base 4: mod_base = um
  modified_base 5: mod_base = gm
  modified_base 6: mod_base = cm
  modified_base 7: mod_base = um
  modified_base 8: mod_base = um
  modified_base 9: mod_base = OTHER; note = 2'-fluorouridine
  modified_base 10: mod_base = OTHER; note = 2'-fluorocytidine
  modified_base 11: mod_base = OTHER; note = 2'-fluoroguanosine
  modified_base 12: mod_base = um
  modified_base 13: mod_base = gm
  modified_base 14: mod_base = gm
  modified_base 15: mod_base = um
  modified_base 16: mod_base = OTHER; note = 2'-O-methyladenosine
  modified_base 17: mod_base = um
  modified_base 18: mod_base = um
  modified_base 19: mod_base = cm
  modified_base 20: mod_base = um
  modified_base 21: mod_base = um
  source 1..21: mol_type = other RNA
gcttgctttcgtggtattctt

SEQ ID NO: 191 - RNA, 21 nt, synthetic construct
  modified_base 1: mod_base = gm
  modified_base 2: mod_base = um
  modified_base 3: mod_base = OTHER; note = 2'-O-methyladenosine
  modified_base 4: mod_base = cm
  modified_base 5: mod_base = OTHER; note = 2'-O-methyladenosine
  modified_base 6: mod_base = cm
  modified_base 7: mod_base = um
  modified_base 8: mod_base = OTHER; note = 2'-O-methyladenosine
  modified_base 9: mod_base = OTHER; note = 2'-fluoroguanosine
  modified_base 10: mod_base = OTHER; note = 2'-fluorocytidine
  modified_base 11: mod_base = OTHER; note = 2'-fluorocytidine
  modified_base 12: mod_base = OTHER; note = 2'-O-methyladenosine
  modified_base 13: mod_base = um
  modified_base 14: mod_base = cm
  modified_base 15: mod_base = cm
  modified_base 16: mod_base = um
  modified_base 17: mod_base = um
  modified_base 18: mod_base = OTHER; note = 2'-O-methyladenosine
  modified_base 19: mod_base = cm
  modified_base 20: mod_base = um
  modified_base 21: mod_base = OTHER; note = 2'-O-methyladenosine
  source 1..21: mol_type = other RNA
gtacactagccatccttacta

SEQ ID NO: 192 - RNA, 21 nt, synthetic construct
  modified_base 1: mod_base = gm
  modified_base 2: mod_base = um
  modified_base 3: mod_base = OTHER; note = 2'-O-methyladenosine
  modified_base 4: mod_base = cm
  modified_base 5: mod_base = um
  modified_base 6: mod_base = gm
  modified_base 7: mod_base = cm
  modified_base 8: mod_base = um
  modified_base 9: mod_base = OTHER; note = 2'-fluoroguanosine
  modified_base 10: mod_base = OTHER; note = 2'-fluorocytidine
  modified_base 11: mod_base = OTHER; note = 2'-fluoroadenosine
  modified_base 12: mod_base = OTHER; note = 2'-O-methyladenosine
  modified_base 13: mod_base = um
  modified_base 14: mod_base = OTHER; note = 2'-O-methyladenosine
  modified_base 15: mod_base = um
  modified_base 16: mod_base = um
  modified_base 17: mod_base = gm
  modified_base 18: mod_base = um
  modified_base 19: mod_base = um
  modified_base 20: mod_base = OTHER; note = 2'-O-methyladenosine
  modified_base 21: mod_base = OTHER; note = 2'-O-methyladenosine
  source 1..21: mol_type = other RNA
gtactgctgcaatattgttaa

SEQ ID NO: 193 - RNA, 21 nt, synthetic construct
  modified_base 1: mod_base = cm
  modified_base 2: mod_base = um
  modified_base 3: mod_base = gm
  modified_base 4: mod_base = cm
  modified_base 5: mod_base = um
  modified_base 6: mod_base = gm
  modified_base 7: mod_base = cm
  modified_base 8: mod_base = OTHER; note = 2'-O-methyladenosine
  modified_base 9: mod_base = OTHER; note = 2'-fluoroadenosine
  modified_base 10: mod_base = OTHER; note = 2'-fluorouridine
  modified_base 11: mod_base = OTHER; note = 2'-fluoroadenosine
  modified_base 12: mod_base = um
  modified_base 13: mod_base = um
  modified_base 14: mod_base = gm
  modified_base 15: mod_base = um
  modified_base 16: mod_base = um
  modified_base 17: mod_base = OTHER; note = 2'-O-methyladenosine
  modified_base 18: mod_base = OTHER; note = 2'-O-methyladenosine
  modified_base 19: mod_base = cm
  modified_base 20: mod_base = gm
  modified_base 21: mod_base = um
  source 1..21: mol_type = other RNA
ctgctgcaatattgttaacgt

SEQ ID NO: 194 - RNA, 21 nt, synthetic construct
  modified_base 1: mod_base = um
  modified_base 2: mod_base = gm
  modified_base 3: mod_base = cm
  modified_base 4: mod_base = um
  modified_base 5: mod_base = gm
  modified_base 6: mod_base = cm
  modified_base 7: mod_base = OTHER; note = 2'-O-methyladenosine
  modified_base 8: mod_base = OTHER; note = 2'-O-methyladenosine
  modified_base 9: mod_base = OTHER; note = 2'-fluorouridine
  modified_base 10: mod_base = OTHER; note = 2'-fluoroadenosine
  modified_base 11: mod_base = OTHER; note = 2'-fluorouridine
  modified_base 12: mod_base = um
  modified_base 13: mod_base = gm
  modified_base 14: mod_base = um
  modified_base 15: mod_base = um
  modified_base 16: mod_base = OTHER; note = 2'-O-methyladenosine
  modified_base 17: mod_base = OTHER; note = 2'-O-methyladenosine
  modified_base 18: mod_base = cm
  modified_base 19: mod_base = gm
  modified_base 20: mod_base = um
  modified_base 21: mod_base = OTHER; note = 2'-O-methyladenosine
  source 1..21: mol_type = other RNA
tgctgcaatattgttaacgta

SEQ ID NO: 195 - RNA, 21 nt, synthetic construct
  modified_base 1: mod_base = um
  modified_base 2: mod_base = gm
  modified_base 3: mod_base = cm
  modified_base 4: mod_base = um
  modified_base 5: mod_base = gm
  modified_base 6: mod_base = cm
  modified_base 7: mod_base = OTHER; note = 2'-O-methyladenosine
  modified_base 8: mod_base = OTHER; note = 2'-O-methyladenosine
  modified_base 9: mod_base = OTHER; note = 2'-fluorouridine
  modified_base 10: mod_base = OTHER; note = 2'-O-methyl-2-aminoadenosine
  modified_base 11: mod_base = OTHER; note = 2'-fluorouridine
  modified_base 12: mod_base = um
  modified_base 13: mod_base = gm
  modified_base 14: mod_base = um
  modified_base 15: mod_base = um
  modified_base 16: mod_base = OTHER; note = 2'-O-methyladenosine
  modified_base 17: mod_base = OTHER; note = 2'-O-methyladenosine
  modified_base 18: mod_base = cm
  modified_base 19: mod_base = gm
  modified_base 20: mod_base = um
  modified_base 21: mod_base = OTHER; note = 2'-O-methyladenosine
  source 1..21: mol_type = other RNA
tgctgcaatnttgttaacgta

SEQ ID NO: 196 - RNA, 21 nt, synthetic construct
  modified_base 1: mod_base = cm
  modified_base 2: mod_base = cm
  modified_base 3: mod_base = um
  modified_base 4: mod_base = gm
  modified_base 5: mod_base = OTHER; note = 2'-O-methyladenosine
  modified_base 6: mod_base = um
  modified_base 7: mod_base = cm
  modified_base 8: mod_base = um
  modified_base 9: mod_base = OTHER; note = 2'-fluorouridine
  modified_base 10: mod_base = OTHER; note = 2'-fluorocytidine
  modified_base 11: mod_base = OTHER; note = 2'-fluorouridine
  modified_base 12: mod_base = gm
  modified_base 13: mod_base = gm
  modified_base 14: mod_base = um
  modified_base 15: mod_base = cm
  modified_base 16: mod_base = um
  modified_base 17: mod_base = OTHER; note = 2'-O-methyladenosine
  modified_base 18: mod_base = OTHER; note = 2'-O-methyladenosine
  modified_base 19: mod_base = OTHER; note = 2'-O-methyladenosine
  modified_base 20: mod_base = cm
  modified_base 21: mod_base = OTHER; note = 2'-O-methyladenosine
  source 1..21: mol_type = other RNA
cctgatcttctggtctaaaca

SEQ ID NO: 197 - RNA, 21 nt, synthetic construct
  modified_base 1: mod_base = cm
  modified_base 2: mod_base = OTHER; note = 2'-O-methyladenosine
  modified_base 3: mod_base = um
  modified_base 4: mod_base = cm
  modified_base 5: mod_base = OTHER; note = 2'-O-methyladenosine
  modified_base 6: mod_base = cm
  modified_base 7: mod_base = gm
  modified_base 8: mod_base = OTHER; note = 2'-O-methyladenosine
  modified_base 9: mod_base = OTHER; note = 2'-fluoroadenosine
  modified_base 10: mod_base = OTHER; note = 2'-fluorocytidine
  modified_base 11: mod_base = OTHER; note = 2'-fluoroguanosine
  modified_base 12: mod_base = cm
  modified_base 13: mod_base = um
  modified_base 14: mod_base = um
  modified_base 15: mod_base = um
  modified_base 16: mod_base = cm
  modified_base 17: mod_base = um
  modified_base 18: mod_base = um
  modified_base 19: mod_base = OTHER; note = 2'-O-methyladenosine
  modified_base 20: mod_base = um
  modified_base 21: mod_base = um
  source 1..21: mol_type = other RNA
catcacgaacgctttcttatt

SEQ ID NO: 198 - RNA, 21 nt, synthetic construct
  modified_base 1: mod_base = cm
  modified_base 2: mod_base = OTHER; note = 2'-O-methyladenosine
  modified_base 3: mod_base = um
  modified_base 4: mod_base = cm
  modified_base 5: mod_base = OTHER; note = 2'-O-methyladenosine
  modified_base 6: mod_base = cm
  modified_base 7: mod_base = gm
  modified_base 8: mod_base = OTHER; note = 2'-O-methyladenosine
  modified_base 9: mod_base = OTHER; note = 2'-fluoroadenosine
  modified_base 10: mod_base = OTHER; note = 2'-fluorocytidine
  modified_base 11: mod_base = OTHER; note = 2'-fluoroguanosine
  modified_base 12: mod_base = cm
  modified_base 13: mod_base = um
  modified_base 14: mod_base = um
  modified_base 15: mod_base = um
  modified_base 16: mod_base = cm
  modified_base 17: mod_base = um
  modified_base 18: mod_base = um
  modified_base 19: mod_base = OTHER; note = 2'-O-methyl-2-aminoadenosine
  modified_base 20: mod_base = um
  modified_base 21: mod_base = um
  source 1..21: mol_type = other RNA
catcacgaacgctttcttntt

SEQ ID NO: 199 - RNA, 21 nt, synthetic construct
  modified_base 1: mod_base = cm
  modified_base 2: mod_base = gm
  modified_base 3: mod_base = OTHER; note = 2'-O-methyladenosine
  modified_base 4: mod_base = OTHER; note = 2'-O-methyladenosine
  modified_base 5: mod_base = cm
  modified_base 6: mod_base = gm
  modified_base 7: mod_base = cm
  modified_base 8: mod_base = um
  modified_base 9: mod_base = OTHER; note = 2'-fluorouridine
  modified_base 10: mod_base = OTHER; note = 2'-fluorouridine
  modified_base 11: mod_base = OTHER; note = 2'-fluorocytidine
  modified_base 12: mod_base = um
  modified_base 13: mod_base = um
  modified_base 14: mod_base = OTHER; note = 2'-O-methyladenosine
  modified_base 15: mod_base = um
  modified_base 16: mod_base = um
  modified_base 17: mod_base = OTHER; note = 2'-O-methyladenosine
  modified_base 18: mod_base = cm
  modified_base 19: mod_base = OTHER; note = 2'-O-methyladenosine
  modified_base 20: mod_base = OTHER; note = 2'-O-methyladenosine
  modified_base 21: mod_base = OTHER; note = 2'-O-methyladenosine
  source 1..21: mol_type = other RNA
cgaacgctttcttattacaaa

SEQ ID NO: 200 - RNA, 21 nt, synthetic construct
  modified_base 1: mod_base = gm
  modified_base 2: mod_base = OTHER; note = 2'-O-methyladenosine
  modified_base 3: mod_base = cm
  modified_base 4: mod_base = OTHER; note = 2'-O-methyladenosine
  modified_base 5: mod_base = gm
  modified_base 6: mod_base = um
  modified_base 7: mod_base = OTHER; note = 2'-O-methyladenosine
  modified_base 8: mod_base = OTHER; note = 2'-O-methyladenosine
  modified_base 9: mod_base = OTHER; note = 2'-fluoroguanosine
  modified_base 10: mod_base = OTHER; note = 2'-fluorouridine
  modified_base 11: mod_base = OTHER; note = 2'-fluoroguanosine
  modified_base 12: mod_base = OTHER; note = 2'-O-methyladenosine
  modified_base 13: mod_base = cm
  modified_base 14: mod_base = OTHER; note = 2'-O-methyladenosine
  modified_base 15: mod_base = OTHER; note = 2'-O-methyladenosine
  modified_base 16: mod_base = cm
  modified_base 17: mod_base = OTHER; note = 2'-O-methyladenosine
  modified_base 18: mod_base = gm
  modified_base 19: mod_base = OTHER; note = 2'-O-methyladenosine
  modified_base 20: mod_base = um
  modified_base 21: mod_base = OTHER; note = 2'-O-methyladenosine
  source 1..21: mol_type = other RNA
gacagtaagtgacaacagata

SEQ ID NO: 201 - RNA, 21 nt, synthetic construct
  modified_base 1: mod_base = cm
  modified_base 2: mod_base = OTHER; note = 2'-O-methyladenosine
  modified_base 3: mod_base = gm
  modified_base 4: mod_base = um
  modified_base 5: mod_base = OTHER; note = 2'-O-methyladenosine
  modified_base 6: mod_base = OTHER; note = 2'-O-methyladenosine
  modified_base 7: mod_base = gm
  modified_base 8: mod_base = um
  modified_base 9: mod_base = OTHER; note = 2'-fluoroguanosine
  modified_base 10: mod_base = OTHER; note = 2'-fluoroadenosine
  modified_base 11: mod_base = OTHER; note = 2'-fluorocytidine
  modified_base 12: mod_base = OTHER; note = 2'-O-methyladenosine
  modified_base 13: mod_base = OTHER; note = 2'-O-methyladenosine
  modified_base 14: mod_base = cm
  modified_base 15: mod_base = OTHER; note = 2'-O-methyladenosine
  modified_base 16: mod_base = gm
  modified_base 17: mod_base = OTHER; note = 2'-O-methyladenosine
  modified_base 18: mod_base = um
  modified_base 19: mod_base = gm
  modified_base 20: mod_base = um
  modified_base 21: mod_base = um
  source 1..21: mol_type = other RNA
cagtaagtgacaacagatgtt

SEQ ID NO: 202 - RNA, 21 nt, synthetic construct
  modified_base 1: mod_base = cm
  modified_base 2: mod_base = OTHER; note = 2'-O-methyl-2-aminoadenosine
  modified_base 3: mod_base = OTHER; note = 2'-O-methyladenosine
  modified_base 4: mod_base = OTHER; note = 2'-O-methyladenosine
  modified_base 5: mod_base = um
  modified_base 6: mod_base = um
  modified_base 7: mod_base = gm
  modified_base 8: mod_base = gm
  modified_base 9: mod_base = OTHER; note = 2'-fluoroadenosine
  modified_base 10: mod_base = OTHER; note = 2'-fluorouridine
  modified_base 11: mod_base = OTHER; note = 2'-fluoroguanosine
  modified_base 12: mod_base = OTHER; note = 2'-O-methyladenosine
  modified_base 13: mod_base = cm
  modified_base 14: mod_base = OTHER; note = 2'-O-methyladenosine
  modified_base 15: mod_base = OTHER; note = 2'-O-methyladenosine
  modified_base 16: mod_base = OTHER; note = 2'-O-methyladenosine
  modified_base 17: mod_base = gm
  modified_base 18: mod_base = OTHER; note = 2'-O-methyladenosine
  modified_base 19: mod_base = um
  modified_base 20: mod_base = cm
  modified_base 21: mod_base = OTHER; note = 2'-O-methyladenosine
  source 1..21: mol_type = other RNA
cnaattggatgacaaagatca

SEQ ID NO: 203 - RNA, 21 nt, synthetic construct
  modified_base 1: mod_base = cm
  modified_base 2: mod_base = um
  modified_base 3: mod_base = cm
  modified_base 4: mod_base = OTHER; note = 2'-O-methyladenosine
  modified_base 5: mod_base = cm
  modified_base 6: mod_base = OTHER; note = 2'-O-methyladenosine
  modified_base 7: mod_base = um
  modified_base 8: mod_base = OTHER; note = 2'-O-methyladenosine
  modified_base 9: mod_base = OTHER; note = 2'-fluoroguanosine
  modified_base 10: mod_base = OTHER; note = 2'-fluorocytidine
  modified_base 11: mod_base = OTHER; note = 2'-fluoroadenosine
  modified_base 12: mod_base = OTHER; note = 2'-O-methyladenosine
  modified_base 13: mod_base = um
  modified_base 14: mod_base = cm
  modified_base 15: mod_base = um
  modified_base 16: mod_base = um
  modified_base 17: mod_base = um
  modified_base 18: mod_base = OTHER; note = 2'-O-methyladenosine
  modified_base 19: mod_base = OTHER; note = 2'-O-methyl-2-aminoadenosine
  modified_base 20: mod_base = um
  modified_base 21: mod_base = OTHER; note = 2'-O-methyladenosine
  source 1..21: mol_type = other RNA
ctcacatagcaatctttanta

SEQ ID NO: 204 - RNA, 21 nt, synthetic construct
  modified_base 1: mod_base = cm
  modified_base 2: mod_base = cm
  modified_base 3: mod_base = um
  modified_base 4: mod_base = um
  modified_base 5: mod_base = um
  modified_base 6: mod_base = um
  modified_base 7: mod_base = gm
  modified_base 8: mod_base = OTHER; note = 2'-O-methyladenosine
  modified_base 9: mod_base = OTHER; note = 2'-fluorouridine
  modified_base 10: mod_base = OTHER; note = 2'-fluoroguanosine
  modified_base 11: mod_base = OTHER; note = 2'-fluorouridine
  modified_base 12: mod_base = um
  modified_base 13: mod_base = gm
  modified_base 14: mod_base = um
  modified_base 15: mod_base = um
  modified_base 16: mod_base = OTHER; note = 2'-O-methyladenosine
  modified_base 17: mod_base = gm
  modified_base 18: mod_base = OTHER; note = 2'-O-methyladenosine
  modified_base 19: mod_base = cm
  modified_base 20: mod_base = OTHER; note = 2'-O-methyladenosine
  modified_base 21: mod_base = OTHER; note = 2'-O-methyladenosine
  source 1..21: mol_type = other RNA
ccttttgatgttgttagacaa

SEQ ID NO: 205 - RNA, 21 nt, synthetic construct
  modified_base 1: mod_base = um
  modified_base 2: mod_base = gm
  modified_base 3: mod_base = gm
  modified_base 4: mod_base = um
  modified_base 5: mod_base = OTHER; note = 2'-O-methyladenosine
  modified_base 6: mod_base = OTHER; note = 2'-O-methyladenosine
  modified_base 7: mod_base = um
  modified_base 8: mod_base = gm
  modified_base 9: mod_base = OTHER; note = 2'-fluorocytidine
  modified_base 10: mod_base = OTHER; note = 2'-fluorouridine
  modified_base 11: mod_base = OTHER; note = 2'-fluorouridine
  modified_base 12: mod_base = um
  modified_base 13: mod_base = OTHER; note = 2'-O-methyladenosine
  modified_base 14: mod_base = gm
  modified_base 15: mod_base = OTHER; note = 2'-O-methyladenosine
  modified_base 16: mod_base = um
  modified_base 17: mod_base = cm
  modified_base 18: mod_base = OTHER; note = 2'-O-methyladenosine
  modified_base 19: mod_base = OTHER; note = 2'-O-methyladenosine
  modified_base 20: mod_base = gm
  modified_base 21: mod_base = OTHER; note = 2'-O-methyladenosine
  source 1..21: mol_type = other RNA
tggtaatgctttagatcaaga

SEQ ID NO: 206 - RNA, 21 nt, synthetic construct
  modified_base 1: mod_base = gm
  modified_base 2: mod_base = cm
  modified_base 3: mod_base = OTHER; note = 2'-O-methyladenosine
  modified_base 4: mod_base = um
  modified_base 5: mod_base = OTHER; note = 2'-O-methyladenosine
  modified_base 6: mod_base = cm
  modified_base 7: mod_base = OTHER; note = 2'-O-methyladenosine
  modified_base 8: mod_base = OTHER; note = 2'-O-methyladenosine
  modified_base 9: mod_base = OTHER; note = 2'-fluorouridine
  modified_base 10: mod_base = OTHER; note = 2'-fluoroguanosine
  modified_base 11: mod_base = OTHER; note = 2'-fluorocytidine
  modified_base 12: mod_base = um
  modified_base 13: mod_base = OTHER; note = 2'-O-methyladenosine
  modified_base 14: mod_base = gm
  modified_base 15: mod_base = um
  modified_base 16: mod_base = um
  modified_base 17: mod_base = OTHER; note = 2'-O-methyladenosine
  modified_base 18: mod_base = OTHER; note = 2'-O-methyladenosine
  modified_base 19: mod_base = OTHER; note = 2'-O-methyladenosine
  modified_base 20: mod_base = cm
  modified_base 21: mod_base = OTHER; note = 2'-O-methyladenosine
  source 1..21: mol_type = other RNA
gcatacaatgctagttaaaca

SEQ ID NO: 207 - RNA, 21 nt, synthetic construct
  modified_base 1: mod_base = cm
  modified_base 2: mod_base = OTHER; note = 2'-O-methyl-2-aminoadenosine
  modified_base 3: mod_base = um
  modified_base 4: mod_base = OTHER; note = 2'-O-methyladenosine
  modified_base 5: mod_base = cm
  modified_base 6: mod_base = OTHER; note = 2'-O-methyladenosine
  modified_base 7: mod_base = OTHER; note = 2'-O-methyladenosine
  modified_base 8: mod_base = um
  modified_base 9: mod_base = OTHER; note = 2'-fluoroguanosine
  modified_base 10: mod_base = OTHER; note = 2'-fluorocytidine
  modified_base 11: mod_base = OTHER; note = 2'-fluorouridine
  modified_base 12: mod_base = OTHER; note = 2'-O-methyladenosine
  modified_base 13: mod_base = gm
  modified_base 14: mod_base = um
  modified_base 15: mod_base = um
  modified_base 16: mod_base = OTHER; note = 2'-O-methyladenosine
  modified_base 17: mod_base = OTHER; note = 2'-O-methyladenosine
  modified_base 18: mod_base = OTHER; note = 2'-O-methyladenosine
  modified_base 19: mod_base = cm
  modified_base 20: mod_base = OTHER; note = 2'-O-methyladenosine
  modified_base 21: mod_base = OTHER; note = 2'-O-methyladenosine
  source 1..21: mol_type = other RNA
cntacaatgctagttaaacaa

SEQ ID NO: 208 - RNA, 21 nt, synthetic construct
  modified_base 1: mod_base = gm
  modified_base 2: mod_base = um
  modified_base 3: mod_base = gm
  modified_base 4: mod_base = cm
  modified_base 5: mod_base = OTHER; note = 2'-O-methyladenosine
  modified_base 6: mod_base = um
  modified_base 7: mod_base = OTHER; note = 2'-O-methyladenosine
  modified_base 8: mod_base = OTHER; note = 2'-O-methyladenosine
  modified_base 9: mod_base = OTHER; note = 2'-fluorouridine
  modified_base 10: mod_base = OTHER; note = 2'-fluoroguanosine
  modified_base 11: mod_base = OTHER; note = 2'-fluorouridine
  modified_base 12: mod_base = cm
  modified_base 13: mod_base = um
  modified_base 14: mod_base = gm
  modified_base 15: mod_base = OTHER; note = 2'-O-methyladenosine
  modified_base 16: mod_base = um
  modified_base 17: mod_base = OTHER; note = 2'-O-methyladenosine
  modified_base 18: mod_base = gm
  modified_base 19: mod_base = OTHER; note = 2'-O-methyladenosine
  modified_base 20: mod_base = gm
  modified_base 21: mod_base = OTHER; note = 2'-O-methyladenosine
  source 1..21: mol_type = other RNA
gtgcataatgtctgatagaga

SEQ ID NO: 209 - RNA, 21 nt, synthetic construct
  modified_base 1: mod_base = gm
  modified_base 2: mod_base = gm
  modified_base 3: mod_base = um
  modified_base 4: mod_base = cm
  modified_base 5: mod_base = gm
  modified_base 6: mod_base = OTHER; note = 2'-O-methyladenosine
  modified_base 7: mod_base = um
  modified_base 8: mod_base = um
  modified_base 9: mod_base = OTHER; note = 2'-fluorocytidine
  modified_base 10: mod_base = OTHER; note = 2'-fluoroadenosine
  modified_base 11: mod_base = OTHER; note = 2'-fluoroguanosine
  modified_base 12: mod_base = OTHER; note = 2'-O-methyladenosine
  modified_base 13: mod_base = um
  modified_base 14: mod_base = cm
  modified_base 15: mod_base = um
  modified_base 16: mod_base = um
  modified_base 17: mod_base = OTHER; note = 2'-O-methyladenosine
  modified_base 18: mod_base = OTHER; note = 2'-O-methyladenosine
  modified_base 19: mod_base = um
  modified_base 20: mod_base = gm
  modified_base 21: mod_base = OTHER; note = 2'-O-methyladenosine
  source 1..21: mol_type = other RNA
ggtcgattcagatcttaatga

SEQ ID NO: 210 - RNA, 21 nt, synthetic construct
  modified_base 1: mod_base = gm
  modified_base 2: mod_base = gm
  modified_base 3: mod_base = um
  modified_base 4: mod_base = cm
  modified_base 5: mod_base = cm
  modified_base 6: mod_base = OTHER; note = 2'-O-methyladenosine
  modified_base 7: mod_base = gm
  modified_base 8: mod_base = OTHER; note = 2'-O-methyladenosine
  modified_base 9: mod_base = OTHER; note = 2'-fluorouridine
  modified_base 10: mod_base = OTHER; note = 2'-fluoroguanosine
  modified_base 11: mod_base = OTHER; note = 2'-fluoroadenosine
  modified_base 12: mod_base = cm
  modified_base 13: mod_base = cm
  modified_base 14: mod_base = OTHER; note = 2'-O-methyladenosine
  modified_base 15: mod_base = OTHER; note = 2'-O-methyladenosine
  modified_base 16: mod_base = OTHER; note = 2'-O-methyladenosine
  modified_base 17: mod_base = um
  modified_base 18: mod_base = um
  modified_base 19: mod_base = gm
  modified_base 20: mod_base = gm
  modified_base 21: mod_base = OTHER; note = 2'-O-methyladenosine
  source 1..21: mol_type = other RNA
ggtccagatgaccaaattgga

SEQ ID NO: 211 - RNA, 21 nt, synthetic construct
  modified_base 1: mod_base = gm
  modified_base 2: mod_base = cm
  modified_base 3: mod_base = cm
  modified_base 4: mod_base = gm
  modified_base 5: mod_base = cm
  modified_base 6: mod_base = OTHER; note = 2'-O-methyladenosine
  modified_base 7: mod_base = OTHER; note = 2'-O-methyladenosine
  modified_base 8: mod_base = OTHER; note = 2'-O-methyladenosine
  modified_base 9: mod_base = OTHER; note = 2'-fluorouridine
  modified_base 10: mod_base = OTHER; note = 2'-fluorouridine
  modified_base 11: mod_base = OTHER; note = 2'-fluoroguanosine
  modified_base 12: mod_base = cm
  modified_base 13: mod_base = OTHER; note = 2'-O-methyladenosine
  modified_base 14: mod_base = cm
  modified_base 15: mod_base = OTHER; note = 2'-O-methyladenosine
  modified_base 16: mod_base = OTHER; note = 2'-O-methyladenosine
  modified_base 17: mod_base = um
  modified_base 18: mod_base = um
  modified_base 19: mod_base = um
  modified_base 20: mod_base = gm
  modified_base 21: mod_base = OTHER; note = 2'-O-methyladenosine
  source 1..21: mol_type = other RNA
gccgcaaattgcacaatttga

SEQ ID NO: 212 - RNA, 21 nt, synthetic construct
  modified_base 1: mod_base = gm
  modified_base 2: mod_base = um
  modified_base 3: mod_base = gm
  modified_base 4: mod_base = OTHER; note = 2'-O-methyladenosine
  modified_base 5: mod_base = cm
  modified_base 6: mod_base = gm
  modified_base 7: mod_base = cm
  modified_base 8: mod_base = OTHER; note = 2'-O-methyladenosine
  modified_base 9: mod_base = OTHER; note = 2'-fluorouridine
  modified_base 10: mod_base = OTHER; note = 2'-fluoroadenosine
  modified_base 11: mod_base = OTHER; note = 2'-fluorocytidine
  modified_base 12: mod_base = OTHER; note = 2'-O-methyladenosine
  modified_base 13: mod_base = OTHER; note = 2'-O-methyladenosine
  modified_base 14: mod_base = OTHER; note = 2'-O-methyladenosine
  modified_base 15: mod_base = OTHER; note = 2'-O-methyladenosine
  modified_base 16: mod_base = cm
  modified_base 17: mod_base = OTHER; note = 2'-O-methyladenosine
  modified_base 18: mod_base = um
  modified_base 19: mod_base = um
  modified_base 20: mod_base = cm
  modified_base 21: mod_base = OTHER; note = 2'-O-methyladenosine
  source 1..21: mol_type = other RNA
gtgacgcatacaaaacattca

SEQ ID NO: 213 - RNA, 21 nt, synthetic construct
  modified_base 1: mod_base = cm
  modified_base 2: mod_base = OTHER; note = 2'-O-methyl-2-aminoadenosine
  modified_base 3: mod_base = OTHER; note = 2'-O-methyladenosine
  modified_base 4: mod_base = gm
  modified_base 5: mod_base = gm
  modified_base 6: mod_base = OTHER; note = 2'-O-methyladenosine
  modified_base 7: mod_base = OTHER; note = 2'-O-methyladenosine
  modified_base 8: mod_base = gm
  modified_base 9: mod_base = OTHER; note = 2'-fluoroadenosine
  modified_base 10: mod_base = OTHER; note = 2'-fluorocytidine
  modified_base 11: mod_base = OTHER; note = 2'-fluorocytidine
  modified_base 12: mod_base = um
  modified_base 13: mod_base = um
  modified_base 14: mod_base = OTHER; note = 2'-O-methyladenosine
  modified_base 15: mod_base = OTHER; note = 2'-O-methyladenosine
  modified_base 16: mod_base = OTHER; note = 2'-O-methyladenosine
  modified_base 17: mod_base = um
  modified_base 18: mod_base = um
  modified_base 19: mod_base = cm
  modified_base 20: mod_base = cm
  modified_base 21: mod_base = OTHER; note = 2'-O-methyladenosine
  source 1..21: mol_type = other RNA
cnaggaagaccttaaattcca

SEQ ID NO: 214 - RNA, 21 nt, synthetic construct
  modified_base 1: mod_base = gm
  modified_base 2: mod_base = um
  modified_base 3: mod_base = cm
  modified_base 4: mod_base = cm
  modified_base 5: mod_base = OTHER; note = 2'-O-methyladenosine
  modified_base 6: mod_base = OTHER; note = 2'-O-methyladenosine
  modified_base 7: mod_base = um
  modified_base 8: mod_base = um
  modified_base 9: mod_base = OTHER; note = 2'-fluoroadenosine
  modified_base 10: mod_base = OTHER; note = 2'-fluoroadenosine
  modified_base 11: mod_base = OTHER; note = 2'-fluorocytidine
  modified_base 12: mod_base = OTHER; note = 2'-O-methyladenosine
  modified_base 13: mod_base = cm
  modified_base 14: mod_base = cm
  modified_base 15: mod_base = OTHER; note = 2'-O-methyladenosine
  modified_base 16: mod_base = OTHER; note = 2'-O-methyladenosine
  modified_base 17: mod_base = um
  modified_base 18: mod_base = OTHER; note = 2'-O-methyladenosine
  modified_base 19: mod_base = gm
  modified_base 20: mod_base = cm
  modified_base 21: mod_base = OTHER; note = 2'-O-methyladenosine
  source 1..21: mol_type = other RNA
gtccaattaacaccaatagca

SEQ ID NO: 215 - RNA, 21 nt, synthetic construct
  modified_base 1: mod_base = gm
  modified_base 2: mod_base = um
  modified_base 3: mod_base = cm
  modified_base 4: mod_base = cm
  modified_base 5: mod_base = OTHER; note = 2'-O-methyladenosine
  modified_base 6: mod_base = OTHER; note = 2'-O-methyladenosine
  modified_base 7: mod_base = gm
  modified_base 8: mod_base = OTHER; note = 2'-O-methyladenosine
  modified_base 9: mod_base = OTHER; note = 2'-fluorouridine
  modified_base 10: mod_base = OTHER; note = 2'-fluoroguanosine
  modified_base 11: mod_base = OTHER; note = 2'-fluoroguanosine
  modified_base 12: mod_base = um
  modified_base 13: mod_base = OTHER; note = 2'-O-methyladenosine
  modified_base 14: mod_base = um
  modified_base 15: mod_base = um
  modified_base 16: mod_base = um
  modified_base 17: mod_base = cm
  modified_base 18: mod_base = um
  modified_base 19: mod_base = OTHER; note = 2'-O-methyladenosine
  modified_base 20: mod_base = cm
  modified_base 21: mod_base = um
  source 1..21: mol_type = other RNA
gtccaagatggtatttctact

SEQ ID NO: 216 - RNA, 21 nt, synthetic construct
  modified_base 1: mod_base = cm
  modified_base 2: mod_base = OTHER; note = 2'-O-methyl-2-aminoadenosine
  modified_base 3: mod_base = OTHER; note = 2'-O-methyladenosine
  modified_base 4: mod_base = gm
  modified_base 5: mod_base = OTHER; note = 2'-O-methyladenosine
  modified_base 6: mod_base = um
  modified_base 7: mod_base = gm
  modified_base 8: mod_base = gm
  modified_base 9: mod_base = OTHER; note = 2'-fluorouridine
  modified_base 10: mod_base = OTHER; note = 2'-fluoroadenosine
  modified_base 11: mod_base = OTHER; note = 2'-fluorouridine
  modified_base 12: mod_base = um
  modified_base 13: mod_base = um
  modified_base 14: mod_base = cm
  modified_base 15: mod_base = um
  modified_base 16: mod_base = OTHER; note = 2'-O-methyladenosine
  modified_base 17: mod_base = cm
  modified_base 18: mod_base = um
  modified_base 19: mod_base = OTHER; note = 2'-O-methyladenosine
  modified_base 20: mod_base = cm
  modified_base 21: mod_base = OTHER; note = 2'-O-methyladenosine
  source 1..21: mol_type = other RNA
cnagatggtatttctactaca

SEQ ID NO: 217 - RNA, 21 nt, synthetic construct
  modified_base 1: mod_base = gm
  modified_base 2: mod_base = um
  modified_base 3: mod_base = gm
  modified_base 4: mod_base = OTHER; note = 2'-O-methyladenosine
  modified_base 5: mod_base = OTHER; note = 2'-O-methyladenosine
  modified_base 6: mod_base = um
  modified_base 7: mod_base = OTHER; note = 2'-O-methyladenosine
  modified_base 8: mod_base = cm
  modified_base 9: mod_base = OTHER; note = 2'-fluoroadenosine
  modified_base 10: mod_base = OTHER; note = 2'-fluorocytidine
  modified_base 11: mod_base = OTHER; note = 2'-fluorocytidine
  modified_base 12: mod_base = OTHER; note = 2'-O-methyladenosine
  modified_base 13: mod_base = OTHER; note = 2'-O-methyladenosine
  modified_base 14: mod_base = OTHER; note = 2'-O-methyladenosine
  modified_base 15: mod_base = OTHER; note = 2'-O-methyladenosine
  modified_base 16: mod_base = gm
  modified_base 17: mod_base = OTHER; note = 2'-O-methyladenosine
  modified_base 18: mod_base = um
  modified_base 19: mod_base = cm
  modified_base 20: mod_base = OTHER; note = 2'-O-methyladenosine
  modified_base 21: mod_base = OTHER; note = 2'-O-methyladenosine
  source 1..21: mol_type = other RNA
gtgaatacaccaaaagatcaa

SEQ ID NO: 218 - RNA, 21 nt, synthetic construct
  modified_base 1: mod_base = cm
  modified_base 2: mod_base = um
  modified_base 3: mod_base = gm
  modified_base 4: mod_base = um
  modified_base 5: mod_base = cm
  modified_base 6: mod_base = OTHER; note = 2'-O-methyladenosine
  modified_base 7: mod_base = cm
  modified_base 8: mod_base = um
  modified_base 9: mod_base = OTHER; note = 2'-fluoroadenosine
  modified_base 10: mod_base = OTHER; note = 2'-fluoroadenosine
  modified_base 11: mod_base = OTHER; note = 2'-fluoroguanosine
  modified_base 12: mod_base = OTHER; note = 2'-O-methyladenosine
  modified_base 13: mod_base = OTHER; note = 2'-O-methyladenosine
  modified_base 14: mod_base = OTHER; note = 2'-O-methyladenosine
  modified_base 15: mod_base = um
  modified_base 16: mod_base = cm
  modified_base 17: mod_base = um
  modified_base 18: mod_base = OTHER; note = 2'-O-methylinosine
  modified_base 19: mod_base = cm
  modified_base 20: mod_base = um
  modified_base 21: mod_base = OTHER; note = 2'-O-methyladenosine
  source 1..21: mol_type = other RNA
ctgtcactaagaaatctncta

SEQ ID NO: 219 - RNA, 21 nt, synthetic construct
  modified_base 1: mod_base = cm
  modified_base 2: mod_base = cm
  modified_base 3: mod_base = OTHER; note = 2'-O-methyladenosine
  modified_base 4: mod_base = cm
  modified_base 5: mod_base = um
  modified_base 6: mod_base = OTHER; note = 2'-O-methyladenosine
  modified_base 7: mod_base = OTHER; note = 2'-O-methyladenosine
  modified_base 8: mod_base = OTHER; note = 2'-O-methyladenosine
  modified_base 9: mod_base = OTHER; note = 2'-fluoroguanosine
  modified_base 10: mod_base = OTHER; note = 2'-fluorocytidine
  modified_base 11: mod_base = OTHER; note = 2'-fluoroadenosine
  modified_base 12: mod_base = um
  modified_base 13: mod_base = OTHER; note = 2'-O-methyladenosine
  modified_base 14: mod_base = cm
  modified_base 15: mod_base = OTHER; note = 2'-O-methyladenosine
  modified_base 16: mod_base = OTHER; note = 2'-O-methyladenosine
  modified_base 17: mod_base = um
  modified_base 18: mod_base = gm
  modified_base 19: mod_base = um
  modified_base 20: mod_base = OTHER; note = 2'-O-methyladenosine
  modified_base 21: mod_base = OTHER; note = 2'-O-methyladenosine
  source 1..21: mol_type = other RNA
ccactaaagcatacaatgtaa

SEQ ID NO: 220 - RNA, 21 nt, synthetic construct
  modified_base 1: mod_base = gm
  modified_base 2: mod_base = cm
  modified_base 3: mod_base = OTHER; note = 2'-O-methyladenosine
  modified_base 4: mod_base = gm
  modified_base 5: mod_base = OTHER; note = 2'-O-methyladenosine
  modified_base 6: mod_base = cm
  modified_base 7: mod_base = OTHER; note = 2'-O-methyladenosine
  modified_base 8: mod_base = OTHER; note = 2'-O-methyladenosine
  modified_base 9: mod_base = OTHER; note = 2'-fluoroguanosine
  modified_base 10: mod_base = OTHER; note = 2'-fluoroguanosine
  modified_base 11: mod_base = OTHER; note = 2'-fluoroadenosine
  modified_base 12: mod_base = OTHER; note = 2'-O-methyladenosine
  modified_base 13: mod_base = cm
  modified_base 14: mod_base = um
  modified_base 15: mod_base = gm
  modified_base 16: mod_base = OTHER; note = 2'-O-methyladenosine
  modified_base 17: mod_base = um
  modified_base 18: mod_base = um
  modified_base 19: mod_base = OTHER; note = 2'-O-methyladenosine
  modified_base 20: mod_base = cm
  modified_base 21: mod_base = OTHER; note = 2'-O-methyladenosine
  source 1..21: mol_type = other RNA
gcagacaaggaactgattaca

SEQ ID NO: 221 - RNA, 21 nt, synthetic construct
  modified_base 1: mod_base = gm
  modified_base 2: mod_base = gm
  modified_base 3: mod_base = OTHER; note = 2'-O-methyladenosine
  modified_base 4: mod_base = cm
  modified_base 5: mod_base = OTHER; note = 2'-O-methyladenosine
  modified_base 6: mod_base = OTHER; note = 2'-O-methyladenosine
  modified_base 7: mod_base = gm
  modified_base 8: mod_base = gm
  modified_base 9: mod_base = OTHER; note = 2'-fluoroadenosine
  modified_base 10: mod_base = OTHER; note = 2'-fluoroadenosine
  modified_base 11: mod_base = OTHER; note = 2'-fluorocytidine
  modified_base 12: mod_base = um
  modified_base 13: mod_base = gm
  modified_base 14: mod_base = OTHER; note = 2'-O-methyladenosine
  modified_base 15: mod_base = um
  modified_base 16: mod_base = um
  modified_base 17: mod_base = OTHER; note = 2'-O-methyladenosine
  modified_base 18: mod_base = cm
  modified_base 19: mod_base = OTHER; note = 2'-O-methyladenosine
  modified_base 20: mod_base = OTHER; note = 2'-O-methyladenosine
  modified_base 21: mod_base = OTHER; note = 2'-O-methyladenosine
  source 1..21: mol_type = other RNA
ggacaaggaactgattacaaa

SEQ ID NO: 222 - RNA, 21 nt, synthetic construct
  modified_base 1: mod_base = gm
  modified_base 2: mod_base = gm
  modified_base 3: mod_base = OTHER; note = 2'-O-methyladenosine
  modified_base 4: mod_base = OTHER; note = 2'-O-methyladenosine
  modified_base 5: mod_base = cm
  modified_base 6: mod_base = um
  modified_base 7: mod_base = gm
  modified_base 8: mod_base = OTHER; note = 2'-O-methyladenosine
  modified_base 9: mod_base = OTHER; note = 2'-fluorouridine
  modified_base 10: mod_base = OTHER; note = 2'-fluorouridine
  modified_base 11: mod_base = OTHER; note = 2'-fluoroadenosine
  modified_base 12: mod_base = cm
  modified_base 13: mod_base = OTHER; note = 2'-O-methyladenosine
  modified_base 14: mod_base = OTHER; note = 2'-O-methyladenosine
  modified_base 15: mod_base = OTHER; note = 2'-O-methyladenosine
  modified_base 16: mod_base = cm
  modified_base 17: mod_base = OTHER; note = 2'-O-methyladenosine
  modified_base 18: mod_base = um
  modified_base 19: mod_base = um
  modified_base 20: mod_base = gm
  modified_base 21: mod_base = OTHER; note = 2'-O-methyladenosine
  source 1..21: mol_type = other RNA
ggaactgattacaaacattga

SEQ ID NO: 223 - RNA, 21 nt, synthetic construct
  modified_base 1: mod_base = gm
  modified_base 2: mod_base = cm
  modified_base 3: mod_base = um
  modified_base 4: mod_base = gm
  modified_base 5: mod_base = OTHER; note = 2'-O-methyladenosine
  modified_base 6: mod_base = OTHER; note = 2'-O-methyladenosine
  modified_base 7: mod_base = um
  modified_base 8: mod_base = OTHER; note = 2'-O-methyladenosine
  modified_base 9: mod_base = OTHER; note = 2'-fluoroadenosine
  modified_base 10: mod_base = OTHER; note = 2'-fluoroguanosine
  modified_base 11: mod_base = OTHER; note = 2'-fluorocytidine
  modified_base 12: mod_base = OTHER; note = 2'-O-methyladenosine
  modified_base 13: mod_base = um
  modified_base 14: mod_base = OTHER; note = 2'-O-methyladenosine
  modified_base 15: mod_base = um
  modified_base 16: mod_base = um
  modified_base 17: mod_base = gm
  modified_base 18: mod_base = OTHER; note = 2'-O-methyladenosine
  modified_base 19: mod_base = cm
  modified_base 20: mod_base = OTHER; note = 2'-O-methylinosine
  modified_base 21: mod_base = OTHER; note = 2'-O-methyladenosine
  source 1..21: mol_type = other RNA
gctgaataagcatattgacna

SEQ ID NO: 224 - RNA, 21 nt, synthetic construct
  modified_base 1: mod_base = gm
  modified_base 1^2: mod_base = OTHER; note = phosphorothioate linkage
  modified_base 2: mod_base = cm
  modified_base 3: mod_base = um
  modified_base 4: mod_base = um
  modified_base 5: mod_base = cm
  modified_base 6: mod_base = um
  modified_base 7: mod_base = um
  modified_base 8: mod_base = OTHER; note = 2'-O-methyladenosine
  modified_base 9: mod_base = OTHER; note = 2'-fluoroadenosine
  modified_base 10: mod_base = OTHER; note = 2'-fluoroguanosine
  modified_base 11: mod_base = OTHER; note = 2'-fluoroadenosine
  modified_base 12: mod_base = gm
  modified_base 13: mod_base = um
  modified_base 14: mod_base = gm
  modified_base 15: mod_base = cm
  modified_base 16: mod_base = um
  modified_base 17: mod_base = um
  modified_base 18: mod_base = OTHER; note = 2'-O-methyladenosine
  modified_base 19: mod_base = um
  modified_base 20: mod_base = gm
  modified_base 21: mod_base = OTHER; note = 2'-O-methyladenosine
  source 1..21: mol_type = other RNA
gcttcttaagagtgcttatga

SEQ ID NO: 225 - RNA, 21 nt, synthetic construct
  modified_base 1: mod_base = cm
  modified_base 1^2: mod_base = OTHER; note = phosphorothioate linkage
  modified_base 2: mod_base = um
  modified_base 3: mod_base = um
  modified_base 4: mod_base = OTHER; note = 2'-O-methyladenosine
  modified_base 5: mod_base = gm
  modified_base 6: mod_base = OTHER; note = 2'-O-methyladenosine
  modified_base 7: mod_base = cm
  modified_base 8: mod_base = OTHER; note = 2'-O-methyladenosine
  modified_base 9: mod_base = OTHER; note = 2'-fluoroadenosine
  modified_base 10: mod_base = OTHER; note = 2'-fluorouridine
  modified_base 11: mod_base = OTHER; note = 2'-fluoroguanosine
  modified_base 12: mod_base = um
  modified_base 13: mod_base = cm
  modified_base 14: mod_base = um
  modified_base 15: mod_base = um
  modified_base 16: mod_base = OTHER; note = 2'-O-methyladenosine
  modified_base 17: mod_base = um
  modified_base 18: mod_base = cm
  modified_base 19: mod_base = um
  modified_base 20: mod_base = OTHER; note = 2'-O-methyladenosine
  modified_base 21: mod_base = OTHER; note = 2'-O-methyladenosine
  source 1..21: mol_type = other RNA
cttagacaatgtcttatctaa

SEQ ID NO: 226 - RNA, 21 nt, synthetic construct
  modified_base 1: mod_base = gm
  modified_base 1^2: mod_base = OTHER; note = phosphorothioate linkage
  modified_base 2: mod_base = cm
  modified_base 3: mod_base = OTHER; note = 2'-O-methyladenosine
  modified_base 4: mod_base = um
  modified_base 5: mod_base = um
  modified_base 6: mod_base = OTHER; note = 2'-O-methyladenosine
  modified_base 7: mod_base = OTHER; note = 2'-O-methyladenosine
  modified_base 8: mod_base = um
  modified_base 9: mod_base = OTHER; note = 2'-fluoroguanosine
  modified_base 10: mod_base = OTHER; note = 2'-fluoroguanosine
  modified_base 11: mod_base = OTHER; note = 2'-fluorocytidine
  modified_base 12: mod_base = OTHER; note = 2'-O-methyladenosine
  modified_base 13: mod_base = OTHER; note = 2'-O-methyladenosine
  modified_base 14: mod_base = um
  modified_base 15: mod_base = cm
  modified_base 16: mod_base = um
  modified_base 17: mod_base = um
  modified_base 18: mod_base = cm
  modified_base 19: mod_base = OTHER; note = 2'-O-methyladenosine
  modified_base 20: mod_base = um
  modified_base 21: mod_base = OTHER; note = 2'-O-methyladenosine
  source 1..21: mol_type = other RNA
gcattaatggcaatcttcata

SEQ ID NO: 227 - RNA, 21 nt, synthetic construct
  modified_base 1: mod_base = gm
  modified_base 1^2: mod_base = OTHER; note = phosphorothioate linkage
  modified_base 2: mod_base = OTHER; note = 2'-O-methyladenosine
  modified_base 3: mod_base = um
  modified_base 4: mod_base = gm
  modified_base 5: mod_base = cm
  modified_base 6: mod_base = um
  modified_base 7: mod_base = um
  modified_base 8: mod_base = OTHER; note = 2'-O-methyladenosine
  modified_base 9: mod_base = OTHER; note = 2'-fluorocytidine
  modified_base 10: mod_base = OTHER; note = 2'-fluoroguanosine
  modified_base 11: mod_base = OTHER; note = 2'-fluorouridine
  modified_base 12: mod_base = um
  modified_base 13: mod_base = OTHER; note = 2'-O-methyladenosine
  modified_base 14: mod_base = OTHER; note = 2'-O-methyladenosine
  modified_base 15: mod_base = um
  modified_base 16: mod_base = OTHER; note = 2'-O-methyladenosine
  modified_base 17: mod_base = cm
  modified_base 18: mod_base = gm
  modified_base 19: mod_base = um
  modified_base 20: mod_base = um
  modified_base 21: mod_base = um
  source 1..21: mol_type = other RNA
gatgcttacgttaatacgttt

SEQ ID NO: 228 - RNA, 21 nt, synthetic construct
  modified_base 1: mod_base = gm
  modified_base 1^2: mod_base = OTHER; note = phosphorothioate linkage
  modified_base 2: mod_base = cm
  modified_base 3: mod_base = OTHER; note = 2'-O-methyladenosine
  modified_base 4: mod_base = cm
  modified_base 5: mod_base = cm
  modified_base 6: mod_base = um
  modified_base 7: mod_base = um
  modified_base 8: mod_base = um
  modified_base 9: mod_base = OTHER; note = 2'-fluoroguanosine
  modified_base 10: mod_base = OTHER; note = 2'-fluoroadenosine
  modified_base 11: mod_base = OTHER; note = 2'-fluorocytidine
  modified_base 12: mod_base = OTHER; note = 2'-O-methyladenosine
  modified_base 13: mod_base = OTHER; note = 2'-O-methyladenosine
  modified_base 14: mod_base = um
  modified_base 15: mod_base = cm
  modified_base 16: mod_base = um
  modified_base 17: mod_base = um
  modified_base 18: mod_base = OTHER; note = 2'-O-methyladenosine
  modified_base 19: mod_base = OTHER; note = 2'-O-methyladenosine
  modified_base 20: mod_base = gm
  modified_base 21: mod_base = OTHER; note = 2'-O-methyladenosine
  source 1..21: mol_type = other RNA
gcacctttgacaatcttaaga

SEQ ID NO: 229 - RNA, 21 nt, synthetic construct
  modified_base 1: mod_base = gm
  modified_base 1^2: mod_base = OTHER; note = phosphorothioate linkage
  modified_base 2: mod_base = gm
  modified_base 3: mod_base = OTHER; note = 2'-O-methyladenosine
  modified_base 4: mod_base = OTHER; note = 2'-O-methyladenosine
  modified_base 5: mod_base = gm
  modified_base 6: mod_base = um
  modified_base 7: mod_base = OTHER; note = 2'-O-methyladenosine
  modified_base 8: mod_base = gm
  modified_base 9: mod_base = OTHER; note = 2'-fluorouridine
  modified_base 10: mod_base = OTHER; note = 2'-fluoroguanosine
  modified_base 11: mod_base = OTHER; note = 2'-fluoroguanosine
  modified_base 12: mod_base = OTHER; note = 2'-O-methyladenosine
  modified_base 13: mod_base = OTHER; note = 2'-O-methyladenosine
  modified_base 14: mod_base = OTHER; note = 2'-O-methyladenosine
  modified_base 15: mod_base = OTHER; note = 2'-O-methyladenosine
  modified_base 16: mod_base = um
  modified_base 17: mod_base = cm
  modified_base 18: mod_base = cm
  modified_base 19: mod_base = um
  modified_base 20: mod_base = OTHER; note = 2'-O-methyladenosine
  modified_base 21: mod_base = OTHER; note = 2'-O-methyladenosine
  source 1..21: mol_type = other RNA
ggaagtagtggaaaatcctaa

SEQ ID NO: 230 - RNA, 21 nt, synthetic construct
  modified_base 1: mod_base = cm
  modified_base 1^2: mod_base = OTHER; note = phosphorothioate linkage
  modified_base 2: mod_base = cm
  modified_base 3: mod_base = um
  modified_base 4: mod_base = um
  modified_base 5: mod_base = um
  modified_base 6: mod_base = um
  modified_base 7: mod_base = gm
  modified_base 8: mod_base = OTHER; note = 2'-O-methyladenosine
  modified_base 9: mod_base = OTHER; note = 2'-fluorouridine
  modified_base 10: mod_base = OTHER; note = 2'-fluoroguanosine
  modified_base 11: mod_base = OTHER; note = 2'-fluorouridine
  modified_base 12: mod_base = um
  modified_base 13: mod_base = gm
  modified_base 14: mod_base = um
  modified_base 15: mod_base = um
  modified_base 16: mod_base = OTHER; note = 2'-O-methyladenosine
  modified_base 17: mod_base = gm
  modified_base 18: mod_base = OTHER; note = 2'-O-methyladenosine
  modified_base 19: mod_base = cm
  modified_base 20: mod_base = OTHER; note = 2'-O-methyladenosine
  modified_base 21: mod_base = OTHER; note = 2'-O-methyladenosine
  source 1..21: mol_type = other RNA
ccttttgatgttgttagacaa

SEQ ID NO: 231 - RNA, 21 nt, synthetic construct
  modified_base 1: mod_base = um
  modified_base 1^2: mod_base = OTHER; note = phosphorothioate linkage
  modified_base 2: mod_base = gm
  modified_base 3: mod_base = gm
  modified_base 4: mod_base = um
  modified_base 5: mod_base = OTHER; note = 2'-O-methyladenosine
  modified_base 6: mod_base = OTHER; note = 2'-O-methyladenosine
  modified_base 7: mod_base = um
  modified_base 8: mod_base = gm
  modified_base 9: mod_base = OTHER; note = 2'-fluorocytidine
  modified_base 10: mod_base = OTHER; note = 2'-fluorouridine
  modified_base 11: mod_base = OTHER; note = 2'-fluorouridine
  modified_base 12: mod_base = um
  modified_base 13: mod_base = OTHER; note = 2'-O-methyladenosine
  modified_base 14: mod_base = gm
  modified_base 15: mod_base = OTHER; note = 2'-O-methyladenosine
  modified_base 16: mod_base = um
  modified_base 17: mod_base = cm
  modified_base 18: mod_base = OTHER; note = 2'-O-methyladenosine
  modified_base 19: mod_base = OTHER; note = 2'-O-methyladenosine
  modified_base 20: mod_base = gm
  modified_base 21: mod_base = OTHER; note = 2'-O-methyladenosine
  source 1..21: mol_type = other RNA
tggtaatgctttagatcaaga

SEQ ID NO: 232 - RNA, 21 nt, synthetic construct
  modified_base 1: mod_base = cm
  modified_base 1^2: mod_base = OTHER; note = phosphorothioate linkage
  modified_base 2: mod_base = OTHER; note = 2'-O-methyladenosine
  modified_base 3: mod_base = OTHER; note = 2'-O-methyladenosine
  modified_base 4: mod_base = gm
  modified_base 5: mod_base = cm
  modified_base 6: mod_base = um
  modified_base 7: mod_base = OTHER; note = 2'-O-methyladenosine
  modified_base 8: mod_base = um
  modified_base 9: mod_base = OTHER; note = 2'-fluoroguanosine
  modified_base 10: mod_base = OTHER; note = 2'-fluoroadenosine
  modified_base 11: mod_base = OTHER; note = 2'-fluorocytidine
  modified_base 12: mod_base = cm
  modified_base 13: mod_base = cm
  modified_base 14: mod_base = OTHER; note = 2'-O-methyladenosine
  modified_base 15: mod_base = OTHER; note = 2'-O-methyladenosine
  modified_base 16: mod_base = OTHER; note = 2'-O-methyladenosine
  modified_base 17: mod_base = um
  modified_base 18: mod_base = gm
  modified_base 19: mod_base = um
  modified_base 20: mod_base = OTHER; note = 2'-O-methyladenosine
  modified_base 21: mod_base = um
  source 1..21: mol_type = other RNA
caagctatgacccaaatgtat

SEQ ID NO: 233 - RNA, 21 nt, synthetic construct
  modified_base 1: mod_base = gm
  modified_base 1^2: mod_base = OTHER; note = phosphorothioate linkage
  modified_base 2: mod_base = um
  modified_base 3: mod_base = cm
  modified_base 4: mod_base = cm
  modified_base 5: mod_base = OTHER; note = 2'-O-methyladenosine
  modified_base 6: mod_base = OTHER; note = 2'-O-methyladenosine
  modified_base 7: mod_base = gm
  modified_base 8: mod_base = OTHER; note = 2'-O-methyladenosine
  modified_base 9: mod_base = OTHER; note = 2'-fluorouridine
  modified_base 10: mod_base = OTHER; note = 2'-fluoroguanosine
  modified_base 11: mod_base = OTHER; note = 2'-fluoroguanosine
  modified_base 12: mod_base = um
  modified_base 13: mod_base = OTHER; note = 2'-O-methyladenosine
  modified_base 14: mod_base = um
  modified_base 15: mod_base = um
  modified_base 16: mod_base = um
  modified_base 17: mod_base = cm
  modified_base 18: mod_base = um
  modified_base 19: mod_base = OTHER; note = 2'-O-methyladenosine
  modified_base 20: mod_base = cm
  modified_base 21: mod_base = um
  source 1..21: mol_type = other RNA
gtccaagatggtatttctact

SEQ ID NO: 234 - RNA, 21 nt, synthetic construct
  modified_base 1: mod_base = cm
  modified_base 1^2: mod_base = OTHER; note = phosphorothioate linkage
  modified_base 2: mod_base = OTHER; note = 2'-O-methyladenosine
  modified_base 3: mod_base = OTHER; note = 2'-O-methyladenosine
  modified_base 4: mod_base = gm
  modified_base 5: mod_base = OTHER; note = 2'-O-methyladenosine
  modified_base 6: mod_base = um
  modified_base 7: mod_base = gm
  modified_base 8: mod_base = gm
  modified_base 9: mod_base = OTHER; note = 2'-fluorouridine
  modified_base 10: mod_base = OTHER; note = 2'-fluoroadenosine
  modified_base 11: mod_base = OTHER; note = 2'-fluorouridine
  modified_base 12: mod_base = um
  modified_base 13: mod_base = um
  modified_base 14: mod_base = cm
  modified_base 15: mod_base = um
  modified_base 16: mod_base = OTHER; note = 2'-O-methyladenosine
  modified_base 17: mod_base = cm
  modified_base 18: mod_base = um
  modified_base 19: mod_base = OTHER; note = 2'-O-methyladenosine
  modified_base 20: mod_base = cm
  modified_base 21: mod_base = OTHER; note = 2'-O-methyladenosine
  source 1..21: mol_type = other RNA
caagatggtatttctactaca

SEQ ID NO: 235 - RNA, 21 nt, synthetic construct
  modified_base 1: mod_base = cm
  modified_base 1^2: mod_base = OTHER; note = phosphorothioate linkage
  modified_base 2: mod_base = cm
  modified_base 3: mod_base = OTHER; note = 2'-O-methyladenosine
  modified_base 4: mod_base = cm
  modified_base 5: mod_base = um
  modified_base 6: mod_base = OTHER; note = 2'-O-methyladenosine
  modified_base 7: mod_base = OTHER; note = 2'-O-methyladenosine
  modified_base 8: mod_base = OTHER; note = 2'-O-methyladenosine
  modified_base 9: mod_base = OTHER; note = 2'-fluoroguanosine
  modified_base 10: mod_base = OTHER; note = 2'-fluorocytidine
  modified_base 11: mod_base = OTHER; note = 2'-fluoroadenosine
  modified_base 12: mod_base = um
  modified_base 13: mod_base = OTHER; note = 2'-O-methyladenosine
  modified_base 14: mod_base = cm
  modified_base 15: mod_base = OTHER; note = 2'-O-methyladenosine
  modified_base 16: mod_base = OTHER; note = 2'-O-methyladenosine
  modified_base 17: mod_base = um
  modified_base 18: mod_base = gm
  modified_base 19: mod_base = um
  modified_base 20: mod_base = OTHER; note = 2'-O-methyladenosine
  modified_base 21: mod_base = OTHER; note = 2'-O-methyladenosine
  source 1..21: mol_type = other RNA
ccactaaagcatacaatgtaa

SEQ ID NO: 236 - RNA, 21 nt, synthetic construct
  modified_base 1: mod_base = gm
  modified_base 1^2: mod_base = OTHER; note = phosphorothioate linkage
  modified_base 2: mod_base = gm
  modified_base 3: mod_base = OTHER; note = 2'-O-methyladenosine
  modified_base 4: mod_base = cm
  modified_base 5: mod_base = OTHER; note = 2'-O-methyladenosine
  modified_base 6: mod_base = OTHER; note = 2'-O-methyladenosine
  modified_base 7: mod_base = gm
  modified_base 8: mod_base = gm
  modified_base 9: mod_base = OTHER; note = 2'-fluoroadenosine
  modified_base 10: mod_base = OTHER; note = 2'-fluoroadenosine
  modified_base 11: mod_base = OTHER; note = 2'-fluorocytidine
  modified_base 12: mod_base = um
  modified_base 13: mod_base = gm
  modified_base 14: mod_base = OTHER; note = 2'-O-methyladenosine
  modified_base 15: mod_base = um
  modified_base 16: mod_base = um
  modified_base 17: mod_base = OTHER; note = 2'-O-methyladenosine
  modified_base 18: mod_base = cm
  modified_base 19: mod_base = OTHER; note = 2'-O-methyladenosine
  modified_base 20: mod_base = OTHER; note = 2'-O-methyladenosine
  modified_base 21: mod_base = OTHER; note = 2'-O-methyladenosine
  source 1..21: mol_type = other RNA
ggacaaggaactgattacaaa

SEQ ID NO: 237 - RNA, 21 nt, synthetic construct
  modified_base 1: mod_base = gm
  modified_base 1^2: mod_base = OTHER; note = phosphorothioate linkage
  modified_base 2: mod_base = cm
  modified_base 3: mod_base = OTHER; note = 2'-O-methyladenosine
  modified_base 4: mod_base = um
  modified_base 5: mod_base = gm
  modified_base 6: mod_base = gm
  modified_base 7: mod_base = um
  modified_base 8: mod_base = OTHER; note = 2'-O-methyladenosine
  modified_base 9: mod_base = OTHER; note = 2'-fluorocytidine
  modified_base 10: mod_base = OTHER; note = 2'-fluorocytidine
  modified_base 11: mod_base = OTHER; note = 2'-fluoroadenosine
  modified_base 12: mod_base = cm
  modified_base 13: mod_base = OTHER; note = 2'-O-methyladenosine
  modified_base 14: mod_base = um
  modified_base 15: mod_base = OTHER; note = 2'-O-methyladenosine
  modified_base 16: mod_base = um
  modified_base 17: mod_base = OTHER; note = 2'-O-methyladenosine
  modified_base 18: mod_base = um
  modified_base 19: mod_base = cm
  modified_base 20: mod_base = OTHER; note = 2'-O-methyladenosine
  modified_base 21: mod_base = OTHER; note = 2'-O-methyladenosine
  source 1..21: mol_type = other RNA
gcatggtaccacatatatcaa

SEQ ID NO: 238 - RNA, 21 nt, synthetic construct
  modified_base 1: mod_base = gm
  modified_base 1^2: mod_base = OTHER; note = phosphorothioate linkage
  modified_base 2: mod_base = um
  modified_base 3: mod_base = OTHER; note = 2'-O-methyladenosine
  modified_base 4: mod_base = cm
  modified_base 5: mod_base = um
  modified_base 6: mod_base = gm
  modified_base 7: mod_base = OTHER; note = 2'-O-methyladenosine
  modified_base 8: mod_base = cm
  modified_base 9: mod_base = OTHER; note = 2'-fluoroadenosine
  modified_base 10: mod_base = OTHER; note = 2'-fluorouridine
  modified_base 11: mod_base = OTHER; note = 2'-fluorouridine
  modified_base 12: mod_base = OTHER; note = 2'-O-methyladenosine
  modified_base 13: mod_base = gm
  modified_base 14: mod_base = OTHER; note = 2'-O-methyladenosine
  modified_base 15: mod_base = um
  modified_base 16: mod_base = OTHER; note = 2'-O-methyladenosine
  modified_base 17: mod_base = OTHER; note = 2'-O-methyladenosine
  modified_base 18: mod_base = um
  modified_base 19: mod_base = cm
  modified_base 20: mod_base = OTHER; note = 2'-O-methyladenosine
  modified_base 21: mod_base = OTHER; note = 2'-O-methyladenosine
  source 1..21: mol_type = other RNA
gtactgacattagataatcaa

SEQ ID NO: 239 - RNA, 21 nt, synthetic construct
  modified_base 1: mod_base = gm
  modified_base 1^2: mod_base = OTHER; note = phosphorothioate linkage
  modified_base 2: mod_base = gm
  modified_base 3: mod_base = OTHER; note = 2'-O-methyladenosine
  modified_base 4: mod_base = um
  modified_base 5: mod_base = gm
  modified_base 6: mod_base = um
  modified_base 7: mod_base = OTHER; note = 2'-O-methyladenosine
  modified_base 8: mod_base = OTHER; note = 2'-O-methyladenosine
  modified_base 9: mod_base = OTHER; note = 2'-fluoroadenosine
  modified_base 10: mod_base = OTHER; note = 2'-fluorocytidine
  modified_base 11: mod_base = OTHER; note = 2'-fluorouridine
  modified_base 12: mod_base = um
  modified_base 13: mod_base = OTHER; note = 2'-O-methyladenosine
  modified_base 14: mod_base = cm
  modified_base 15: mod_base = OTHER; note = 2'-O-methyladenosine
  modified_base 16: mod_base = um
  modified_base 17: mod_base = OTHER; note = 2'-O-methyladenosine
  modified_base 18: mod_base = gm
  modified_base 19: mod_base = cm
  modified_base 20: mod_base = um
  modified_base 21: mod_base = OTHER; note = 2'-O-methyladenosine
  source 1..21: mol_type = other RNA
ggatgtaaacttacatagcta

SEQ ID NO: 240 - RNA, 21 nt, synthetic construct
  modified_base 1: mod_base = cm
  modified_base 1^2: mod_base = OTHER; note = phosphorothioate linkage
  modified_base 2: mod_base = OTHER; note = 2'-O-methyladenosine
  modified_base 3: mod_base = um
  modified_base 4: mod_base = OTHER; note = 2'-O-methyladenosine
  modified_base 5: mod_base = cm
  modified_base 6: mod_base = OTHER; note = 2'-O-methyladenosine
  modified_base 7: mod_base = OTHER; note = 2'-O-methyladenosine
  modified_base 8: mod_base = um
  modified_base 9: mod_base = OTHER; note = 2'-fluoroguanosine
  modified_base 10: mod_base = OTHER; note = 2'-fluorocytidine
  modified_base 11: mod_base = OTHER; note = 2'-fluorouridine
  modified_base 12: mod_base = OTHER; note = 2'-O-methyladenosine
  modified_base 13: mod_base = gm
  modified_base 14: mod_base = um
  modified_base 15: mod_base = um
  modified_base 16: mod_base = OTHER; note = 2'-O-methyladenosine
  modified_base 17: mod_base = OTHER; note = 2'-O-methyladenosine
  modified_base 18: mod_base = OTHER; note = 2'-O-methyladenosine
  modified_base 19: mod_base = cm
  modified_base 20: mod_base = OTHER; note = 2'-O-methyladenosine
  modified_base 21: mod_base = OTHER; note = 2'-O-methyladenosine
  source 1..21: mol_type = other RNA
catacaatgctagttaaacaa

SEQ ID NO: 241 - RNA, 21 nt, synthetic construct
  modified_base 1: mod_base = um
  modified_base 1^2: mod_base = OTHER; note = phosphorothioate linkage
  modified_base 2: mod_base = gm
  modified_base 3: mod_base = cm
  modified_base 4: mod_base = um
  modified_base 5: mod_base = gm
  modified_base 6: mod_base = um
  modified_base 7: mod_base = gm
  modified_base 8: mod_base = gm
  modified_base 9: mod_base = OTHER; note = 2'-fluorouridine
  modified_base 10: mod_base = um
  modified_base 11: mod_base = OTHER; note = 2'-fluoroadenosine
  modified_base 12: mod_base = um
  modified_base 13: mod_base = OTHER; note = 2'-fluoroadenosine
  modified_base 14: mod_base = cm
  modified_base 15: mod_base = cm
  modified_base 16: mod_base = um
  modified_base 17: mod_base = OTHER; note = 2'-O-methyladenosine
  modified_base 18: mod_base = cm
  modified_base 19: mod_base = um
  modified_base 20: mod_base = OTHER; note = 2'-O-methyladenosine
  modified_base 21: mod_base = OTHER; note = 2'-O-methyladenosine
  source 1..21: mol_type = other RNA
tgctgtggttatacctactaa

SEQ ID NO: 242 - RNA, 21 nt, synthetic construct
  modified_base 1: mod_base = gm
  modified_base 1^2: mod_base = OTHER; note = phosphorothioate linkage
  modified_base 2: mod_base = cm
  modified_base 3: mod_base = OTHER; note = 2'-O-methyladenosine
  modified_base 4: mod_base = OTHER; note = 2'-O-methyladenosine
  modified_base 5: mod_base = um
  modified_base 6: mod_base = cm
  modified_base 7: mod_base = OTHER; note = 2'-fluorouridine
  modified_base 8: mod_base = um
  modified_base 9: mod_base = OTHER; note = 2'-fluoroadenosine
  modified_base 10: mod_base = OTHER; note = 2'-O-methyladenosine
  modified_base 11: mod_base = OTHER; note = 2'-fluoroguanosine
  modified_base 12: mod_base = OTHER; note = 2'-O-methyladenosine
  modified_base 13: mod_base = cm
  modified_base 14: mod_base = OTHER; note = 2'-O-methyladenosine
  modified_base 15: mod_base = cm
  modified_base 16: mod_base = um
  modified_base 17: mod_base = um
  modified_base 18: mod_base = cm
  modified_base 19: mod_base = um
  modified_base 20: mod_base = um
  modified_base 21: mod_base = um
  source 1..21: mol_type = other RNA
gcaatcttaagacacttcttt

SEQ ID NO: 243 - RNA, 21 nt, synthetic construct
  modified_base 1: mod_base = gm
  modified_base 1^2: mod_base = OTHER; note = phosphorothioate linkage
  modified_base 2: mod_base = cm
  modified_base 3: mod_base = um
  modified_base 4: mod_base = gm
  modified_base 5: mod_base = OTHER; note = 2'-O-methyladenosine
  modified_base 6: mod_base = OTHER; note = 2'-O-methyladenosine
  modified_base 7: mod_base = OTHER; note = 2'-fluorouridine
  modified_base 8: mod_base = OTHER; note = 2'-O-methyladenosine
  modified_base 9: mod_base = OTHER; note = 2'-fluoroadenosine
  modified_base 10: mod_base = gm
  modified_base 11: mod_base = OTHER; note = 2'-fluorocytidine
  modified_base 12: mod_base = OTHER; note = 2'-O-methyladenosine
  modified_base 13: mod_base = um
  modified_base 14: mod_base = OTHER; note = 2'-O-methyladenosine
  modified_base 15: mod_base = um
  modified_base 16: mod_base = um
  modified_base 17: mod_base = gm
  modified_base 18: mod_base = OTHER; note = 2'-O-methyladenosine
  modified_base 19: mod_base = cm
  modified_base 20: mod_base = OTHER; note = 2'-O-methylinosine
  modified_base 21: mod_base = OTHER; note = 2'-O-methyladenosine
  source 1..21: mol_type = other RNA
gctgaataagcatattgacna

SEQ ID NO: 244 - RNA, 21 nt, synthetic construct
  modified_base 1: mod_base = gm
  modified_base 2: mod_base = cm
  modified_base 3: mod_base = um
  modified_base 4: mod_base = um
  modified_base 5: mod_base = cm
  modified_base 6: mod_base = um
  modified_base 7: mod_base = um
  modified_base 8: mod_base = OTHER; note = 2'-O-methyladenosine
  modified_base 9: mod_base = OTHER; note = 2'-fluoroadenosine
  modified_base 10: mod_base = OTHER; note = 2'-fluoroguanosine
  modified_base 11: mod_base = OTHER; note = 2'-fluoroadenosine
  modified_base 12: mod_base = gm
  modified_base 13: mod_base = um
  modified_base 14: mod_base = gm
  modified_base 15: mod_base = cm
  modified_base 16: mod_base = um
  modified_base 17: mod_base = um
  modified_base 18: mod_base = OTHER; note = 2'-O-methyladenosine
  modified_base 19: mod_base = um
  modified_base 20: mod_base = gm
  modified_base 21: mod_base = OTHER; note = 2'-O-methyladenosine
  source 1..21: mol_type = other RNA
gcttcttaagagtgcttatga

SEQ ID NO: 245 - RNA, 21 nt, synthetic construct
  modified_base 1: mod_base = cm
  modified_base 2: mod_base = um
  modified_base 3: mod_base = um
  modified_base 4: mod_base = cm
  modified_base 5: mod_base = um
  modified_base 6: mod_base = um
  modified_base 7: mod_base = OTHER; note = 2'-O-methyladenosine
  modified_base 8: mod_base = OTHER; note = 2'-O-methyladenosine
  modified_base 9: mod_base = OTHER; note = 2'-fluoroguanosine
  modified_base 10: mod_base = OTHER; note = 2'-fluoroadenosine
  modified_base 11: mod_base = OTHER; note = 2'-fluoroguanosine
  modified_base 12: mod_base = um
  modified_base 13: mod_base = gm
  modified_base 14: mod_base = cm
  modified_base 15: mod_base = um
  modified_base 16: mod_base = um
  modified_base 17: mod_base = OTHER; note = 2'-O-methyladenosine
  modified_base 18: mod_base = um
  modified_base 19: mod_base = gm
  modified_base 20: mod_base = OTHER; note = 2'-O-methyladenosine
  modified_base 21: mod_base = OTHER; note = 2'-O-methyladenosine
  source 1..21: mol_type = other RNA
cttcttaagagtgcttatgaa

SEQ ID NO: 246 - RNA, 21 nt, synthetic construct
  modified_base 1: mod_base = cm
  modified_base 2: mod_base = um
  modified_base 3: mod_base = um
  modified_base 4: mod_base = OTHER; note = 2'-O-methyladenosine
  modified_base 5: mod_base = gm
  modified_base 6: mod_base = OTHER; note = 2'-O-methyladenosine
  modified_base 7: mod_base = cm
  modified_base 8: mod_base = OTHER; note = 2'-O-methyladenosine
  modified_base 9: mod_base = OTHER; note = 2'-fluoroadenosine
  modified_base 10: mod_base = OTHER; note = 2'-fluorouridine
  modified_base 11: mod_base = OTHER; note = 2'-fluoroguanosine
  modified_base 12: mod_base = um
  modified_base 13: mod_base = cm
  modified_base 14: mod_base = um
  modified_base 15: mod_base = um
  modified_base 16: mod_base = OTHER; note = 2'-O-methyladenosine
  modified_base 17: mod_base = um
  modified_base 18: mod_base = cm
  modified_base 19: mod_base = um
  modified_base 20: mod_base = OTHER; note = 2'-O-methyladenosine
  modified_base 21: mod_base = OTHER; note = 2'-O-methyladenosine
  source 1..21: mol_type = other RNA
cttagacaatgtcttatctaa

SEQ ID NO: 247 - RNA, 21 nt, synthetic construct
  modified_base 1: mod_base = gm
  modified_base 2: mod_base = cm
  modified_base 3: mod_base = OTHER; note = 2'-O-methyladenosine
  modified_base 4: mod_base = cm
  modified_base 5: mod_base = cm
  modified_base 6: mod_base = um
  modified_base 7: mod_base = um
  modified_base 8: mod_base = um
  modified_base 9: mod_base = OTHER; note = 2'-fluoroguanosine
  modified_base 10: mod_base = OTHER; note = 2'-fluoroadenosine
  modified_base 11: mod_base = OTHER; note = 2'-fluorocytidine
  modified_base 12: mod_base = OTHER; note = 2'-O-methyladenosine
  modified_base 13: mod_base = OTHER; note = 2'-O-methyladenosine
  modified_base 14: mod_base = um
  modified_base 15: mod_base = cm
  modified_base 16: mod_base = um
  modified_base 17: mod_base = um
  modified_base 18: mod_base = OTHER; note = 2'-O-methyladenosine
  modified_base 19: mod_base = OTHER; note = 2'-O-methyladenosine
  modified_base 20: mod_base = gm
  modified_base 21: mod_base = OTHER; note = 2'-O-methyladenosine
  source 1..21: mol_type = other RNA
gcacctttgacaatcttaaga

SEQ ID NO: 248 - RNA, 21 nt, synthetic construct
  modified_base 1: mod_base = gm
  modified_base 2: mod_base = gm
  modified_base 3: mod_base = OTHER; note = 2'-O-methyladenosine
  modified_base 4: mod_base = OTHER; note = 2'-O-methyladenosine
  modified_base 5: mod_base = gm
  modified_base 6: mod_base = um
  modified_base 7: mod_base = OTHER; note = 2'-O-methyladenosine
  modified_base 8: mod_base = gm
  modified_base 9: mod_base = OTHER; note = 2'-fluorouridine
  modified_base 10: mod_base = OTHER; note = 2'-fluoroguanosine
  modified_base 11: mod_base = OTHER; note = 2'-fluoroguanosine
  modified_base 12: mod_base = OTHER; note = 2'-O-methyladenosine
  modified_base 13: mod_base = OTHER; note = 2'-O-methyladenosine
  modified_base 14: mod_base = OTHER; note = 2'-O-methyladenosine
  modified_base 15: mod_base = OTHER; note = 2'-O-methyladenosine
  modified_base 16: mod_base = um
  modified_base 17: mod_base = cm
  modified_base 18: mod_base = cm
  modified_base 19: mod_base = um
  modified_base 20: mod_base = OTHER; note = 2'-O-methyladenosine
  modified_base 21: mod_base = OTHER; note = 2'-O-methyladenosine
  source 1..21: mol_type = other RNA
ggaagtagtggaaaatcctaa

SEQ ID NO: 249 - RNA, 21 nt, synthetic construct
  modified_base 1: mod_base = gm
  modified_base 1^2: mod_base = OTHER; note = phosphorothioate linkage
  modified_base 2: mod_base = gm
  modified_base 2^3: mod_base = OTHER; note = phosphorothioate linkage
  modified_base 3: mod_base = OTHER; note = 2'-O-methyladenosine
  modified_base 4: mod_base = OTHER; note = 2'-O-methyladenosine
  modified_base 5: mod_base = gm
  modified_base 6: mod_base = um
  modified_base 7: mod_base = OTHER; note = 2'-O-methyladenosine
  modified_base 8: mod_base = gm
  modified_base 9: mod_base = OTHER; note = 2'-fluorouridine
  modified_base 10: mod_base = OTHER; note = 2'-fluoroguanosine
  modified_base 11: mod_base = OTHER; note = 2'-fluoroguanosine
  modified_base 12: mod_base = OTHER; note = 2'-O-methyladenosine
  modified_base 13: mod_base = OTHER; note = 2'-O-methyladenosine
  modified_base 14: mod_base = OTHER; note = 2'-O-methyladenosine
  modified_base 15: mod_base = OTHER; note = 2'-O-methyladenosine
  modified_base 16: mod_base = um
  modified_base 17: mod_base = cm
  modified_base 18: mod_base = cm
  modified_base 19: mod_base = um
  modified_base 20: mod_base = OTHER; note = 2'-O-methyladenosine
  modified_base 20^21: mod_base = OTHER; note = phosphorothioate linkage
  modified_base 21: mod_base = OTHER; note = 2'-O-methyladenosine
  source 1..21: mol_type = other RNA
ggaagtagtggaaaatcctaa

SEQ ID NO: 250 - RNA, 21 nt, synthetic construct
  modified_base 1: mod_base = gm
  modified_base 1^2: mod_base = OTHER; note = phosphorothioate linkage
  modified_base 2: mod_base = um
  modified_base 3: mod_base = cm
  modified_base 4: mod_base = cm
  modified_base 5: mod_base = OTHER; note = 2'-O-methyladenosine
  modified_base 6: mod_base = OTHER; note = 2'-O-methyladenosine
  modified_base 7: mod_base = gm
  modified_base 8: mod_base = OTHER; note = 2'-O-methyladenosine
  modified_base 9: mod_base = OTHER; note = 2'-fluorouridine
  modified_base 10: mod_base = OTHER; note = 2'-fluoroguanosine
  modified_base 11: mod_base = OTHER; note = 2'-fluoroguanosine
  modified_base 12: mod_base = um
  modified_base 13: mod_base = OTHER; note = 2'-O-methyladenosine
  modified_base 14: mod_base = um
  modified_base 15: mod_base = um
  modified_base 16: mod_base = um
  modified_base 17: mod_base = cm
  modified_base 18: mod_base = um
  modified_base 19: mod_base = OTHER; note = 2'-O-methyladenosine
  modified_base 20: mod_base = cm
  modified_base 21: mod_base = OTHER; note = 2'-O-methyladenosine
  source 1..21: mol_type = other RNA
gtccaagatggtatttctaca

SEQ ID NO: 251 - RNA, 21 nt, synthetic construct
  modified_base 1: mod_base = cm
  modified_base 2: mod_base = OTHER; note = 2'-O-methyladenosine
  modified_base 3: mod_base = um
  modified_base 4: mod_base = OTHER; note = 2'-O-methyladenosine
  modified_base 5: mod_base = cm
  modified_base 6: mod_base = OTHER; note = 2'-O-methyladenosine
  modified_base 7: mod_base = OTHER; note = 2'-O-methyladenosine
  modified_base 8: mod_base = um
  modified_base 9: mod_base = OTHER; note = 2'-fluoroguanosine
  modified_base 10: mod_base = OTHER; note = 2'-fluorocytidine
  modified_base 11: mod_base = OTHER; note = 2'-fluorouridine
  modified_base 12: mod_base = OTHER; note = 2'-O-methyladenosine
  modified_base 13: mod_base = gm
  modified_base 14: mod_base = um
  modified_base 15: mod_base = um
  modified_base 16: mod_base = OTHER; note = 2'-O-methyladenosine
  modified_base 17: mod_base = OTHER; note = 2'-O-methyladenosine
  modified_base 18: mod_base = OTHER; note = 2'-O-methyladenosine
  modified_base 19: mod_base = cm
  modified_base 20: mod_base = OTHER; note = 2'-O-methyladenosine
  modified_base 21: mod_base = OTHER; note = 2'-O-methyladenosine
  source 1..21: mol_type = other RNA
catacaatgctagttaaacaa

SEQ ID NO: 252 - RNA, 21 nt, synthetic construct
  modified_base 1: mod_base = cm
  modified_base 2: mod_base = OTHER; note = 2'-O-methyladenosine
  modified_base 3: mod_base = OTHER; note = 2'-O-methyladenosine
  modified_base 4: mod_base = gm
  modified_base 5: mod_base = OTHER; note = 2'-O-methyladenosine
  modified_base 6: mod_base = um
  modified_base 7: mod_base = gm
  modified_base 8: mod_base = gm
  modified_base 9: mod_base = OTHER; note = 2'-fluorouridine
  modified_base 10: mod_base = OTHER; note = 2'-fluoroadenosine
  modified_base 11: mod_base = OTHER; note = 2'-fluorouridine
  modified_base 12: mod_base = um
  modified_base 13: mod_base = um
  modified_base 14: mod_base = cm
  modified_base 15: mod_base = um
  modified_base 16: mod_base = OTHER; note = 2'-O-methyladenosine
  modified_base 17: mod_base = cm
  modified_base 18: mod_base = um
  modified_base 19: mod_base = OTHER; note = 2'-O-methyladenosine
  modified_base 20: mod_base = cm
  modified_base 21: mod_base = OTHER; note = 2'-O-methyladenosine
  source 1..21: mol_type = other RNA
caagatggtatttctactaca

SEQ ID NO: 253 - RNA, 21 nt, synthetic construct
  modified_base 1: mod_base = gm
  modified_base 2: mod_base = gm
  modified_base 3: mod_base = OTHER; note = 2'-O-methyladenosine
  modified_base 4: mod_base = cm
  modified_base 5: mod_base = OTHER; note = 2'-O-methyladenosine
  modified_base 6: mod_base = OTHER; note = 2'-O-methyladenosine
  modified_base 7: mod_base = gm
  modified_base 8: mod_base = gm
  modified_base 9: mod_base = OTHER; note = 2'-fluoroadenosine
  modified_base 10: mod_base = OTHER; note = 2'-fluoroadenosine
  modified_base 11: mod_base = OTHER; note = 2'-fluorocytidine
  modified_base 12: mod_base = um
  modified_base 13: mod_base = gm
  modified_base 14: mod_base = OTHER; note = 2'-O-methyladenosine
  modified_base 15: mod_base = um
  modified_base 16: mod_base = um
  modified_base 17: mod_base = OTHER; note = 2'-O-methyladenosine
  modified_base 18: mod_base = cm
  modified_base 19: mod_base = OTHER; note = 2'-O-methyladenosine
  modified_base 20: mod_base = OTHER; note = 2'-O-methyladenosine
  modified_base 21: mod_base = OTHER; note = 2'-O-methyladenosine
  source 1..21: mol_type = other RNA
ggacaaggaactgattacaaa

SEQ ID NO: 254 - RNA, 21 nt, synthetic construct
  modified_base 1: mod_base = cm
  modified_base 2: mod_base = cm
  modified_base 3: mod_base = OTHER; note = 2'-O-methyladenosine
  modified_base 4: mod_base = cm
  modified_base 5: mod_base = um
  modified_base 6: mod_base = OTHER; note = 2'-O-methyladenosine
  modified_base 7: mod_base = OTHER; note = 2'-O-methyladenosine
  modified_base 8: mod_base = OTHER; note = 2'-O-methyladenosine
  modified_base 9: mod_base = OTHER; note = 2'-fluoroguanosine
  modified_base 10: mod_base = OTHER; note = 2'-fluorocytidine
  modified_base 11: mod_base = OTHER; note = 2'-fluoroadenosine
  modified_base 12: mod_base = um
  modified_base 13: mod_base = OTHER; note = 2'-O-methyladenosine
  modified_base 14: mod_base = cm
  modified_base 15: mod_base = OTHER; note = 2'-O-methyladenosine
  modified_base 16: mod_base = OTHER; note = 2'-O-methyladenosine
  modified_base 17: mod_base = um
  modified_base 18: mod_base = gm
  modified_base 19: mod_base = um
  modified_base 20: mod_base = OTHER; note = 2'-O-methyladenosine
  modified_base 21: mod_base = OTHER; note = 2'-O-methyladenosine
  source 1..21: mol_type = other RNA
ccactaaagcatacaatgtaa

SEQ ID NO: 255 - RNA, 21 nt, synthetic construct
  modified_base 1: mod_base = gm
  modified_base 2: mod_base = um
  modified_base 3: mod_base = cm
  modified_base 4: mod_base = cm
  modified_base 5: mod_base = OTHER; note = 2'-O-methyladenosine
  modified_base 6: mod_base = OTHER; note = 2'-O-methyladenosine
  modified_base 7: mod_base = gm
  modified_base 8: mod_base = OTHER; note = 2'-O-methyladenosine
  modified_base 9: mod_base = OTHER; note = 2'-fluorouridine
  modified_base 10: mod_base = OTHER; note = 2'-fluoroguanosine
  modified_base 11: mod_base = OTHER; note = 2'-fluoroguanosine
  modified_base 12: mod_base = um
  modified_base 13: mod_base = OTHER; note = 2'-O-methyladenosine
  modified_base 14: mod_base = um
  modified_base 15: mod_base = um
  modified_base 16: mod_base = um
  modified_base 17: mod_base = cm
  modified_base 18: mod_base = um
  modified_base 19: mod_base = OTHER; note = 2'-O-methyladenosine
  modified_base 20: mod_base = cm
  modified_base 21: mod_base = um
  source 1..21: mol_type = other RNA
gtccaagatggtatttctact

SEQ ID NO: 256 - RNA, 21 nt, synthetic construct
  modified_base 1: mod_base = gm
  modified_base 2: mod_base = gm
  modified_base 3: mod_base = OTHER; note = 2'-O-methyladenosine
  modified_base 4: mod_base = OTHER; note = 2'-O-methyladenosine
  modified_base 5: mod_base = gm
  modified_base 6: mod_base = um
  modified_base 7: mod_base = OTHER; note = 2'-O-methyladenosine
  modified_base 8: mod_base = gm
  modified_base 9: mod_base = OTHER; note = 2'-fluorouridine
  modified_base 10: mod_base = gm
  modified_base 11: mod_base = OTHER; note = 2'-fluoroguanosine
  modified_base 12: mod_base = OTHER; note = 2'-O-methyladenosine
  modified_base 13: mod_base = OTHER; note = 2'-fluoroadenosine
  modified_base 14: mod_base = OTHER; note = 2'-O-methyladenosine
  modified_base 15: mod_base = OTHER; note = 2'-O-methyladenosine
  modified_base 16: mod_base = um
  modified_base 17: mod_base = cm
  modified_base 18: mod_base = cm
  modified_base 19: mod_base = um
  modified_base 20: mod_base = OTHER; note = 2'-O-methyladenosine
  modified_base 21: mod_base = OTHER; note = 2'-O-methyladenosine
  source 1..21: mol_type = other RNA
ggaagtagtggaaaatcctaa

SEQ ID NO: 257 - RNA, 21 nt, synthetic construct
  modified_base 1: mod_base = cm
  modified_base 2: mod_base = gm
  modified_base 3: mod_base = OTHER; note = 2'-O-methyladenosine
  modified_base 4: mod_base = OTHER; note = 2'-O-methyladenosine
  modified_base 5: mod_base = gm
  modified_base 6: mod_base = um
  modified_base 7: mod_base = OTHER; note = 2'-O-methyladenosine
  modified_base 8: mod_base = gm
  modified_base 9: mod_base = OTHER; note = 2'-fluorouridine
  modified_base 10: mod_base = gm
  modified_base 11: mod_base = OTHER; note = 2'-fluoroguanosine
  modified_base 12: mod_base = OTHER; note = 2'-O-methyladenosine
  modified_base 13: mod_base = OTHER; note = 2'-fluoroadenosine
  modified_base 14: mod_base = OTHER; note = 2'-O-methyladenosine
  modified_base 15: mod_base = OTHER; note = 2'-O-methyladenosine
  modified_base 16: mod_base = um
  modified_base 17: mod_base = cm
  modified_base 18: mod_base = cm
  modified_base 19: mod_base = um
  modified_base 20: mod_base = OTHER; note = 2'-O-methyladenosine
  modified_base 21: mod_base = OTHER; note = 2'-O-methyladenosine
  source 1..21: mol_type = other RNA
cgaagtagtggaaaatcctaa

SEQ ID NO: 258 - RNA, 21 nt, synthetic construct
  modified_base 1: mod_base = cm
  modified_base 2: mod_base = OTHER; note = 2'-O-methyladenosine
  modified_base 3: mod_base = um
  modified_base 4: mod_base = OTHER; note = 2'-O-methyladenosine
  modified_base 5: mod_base = cm
  modified_base 6: mod_base = OTHER; note = 2'-O-methyladenosine
  modified_base 7: mod_base = OTHER; note = 2'-O-methyladenosine
  modified_base 8: mod_base = um
  modified_base 9: mod_base = OTHER; note = 2'-fluoroguanosine
  modified_base 10: mod_base = cm
  modified_base 11: mod_base = OTHER; note = 2'-fluorouridine
  modified_base 12: mod_base = OTHER; note = 2'-O-methyladenosine
  modified_base 13: mod_base = OTHER; note = 2'-fluoroguanosine
  modified_base 14: mod_base = um
  modified_base 15: mod_base = um
  modified_base 16: mod_base = OTHER; note = 2'-O-methyladenosine
  modified_base 17: mod_base = OTHER; note = 2'-O-methyladenosine
  modified_base 18: mod_base = OTHER; note = 2'-O-methyladenosine
  modified_base 19: mod_base = cm
  modified_base 20: mod_base = OTHER; note = 2'-O-methyladenosine
  modified_base 21: mod_base = OTHER; note = 2'-O-methyladenosine
  source 1..21: mol_type = other RNA
catacaatgctagttaaacaa

SEQ ID NO: 259 - RNA, 21 nt, synthetic construct
  modified_base 1: mod_base = cm
  modified_base 2: mod_base = gm
  modified_base 3: mod_base = um
  modified_base 4: mod_base = OTHER; note = 2'-O-methyladenosine
  modified_base 5: mod_base = cm
  modified_base 6: mod_base = OTHER; note = 2'-O-methyladenosine
  modified_base 7: mod_base = OTHER; note = 2'-O-methyladenosine
  modified_base 8: mod_base = um
  modified_base 9: mod_base = OTHER; note = 2'-fluoroguanosine
  modified_base 10: mod_base = cm
  modified_base 11: mod_base = OTHER; note = 2'-fluorouridine
  modified_base 12: mod_base = OTHER; note = 2'-O-methyladenosine
  modified_base 13: mod_base = OTHER; note = 2'-fluoroguanosine
  modified_base 14: mod_base = um
  modified_base 15: mod_base = um
  modified_base 16: mod_base = OTHER; note = 2'-O-methyladenosine
  modified_base 17: mod_base = OTHER; note = 2'-O-methyladenosine
  modified_base 18: mod_base = OTHER; note = 2'-O-methyladenosine
  modified_base 19: mod_base = cm
  modified_base 20: mod_base = OTHER; note = 2'-O-methyladenosine
  modified_base 21: mod_base = OTHER; note = 2'-O-methyladenosine
  source 1..21: mol_type = other RNA
cgtacaatgctagttaaacaa

SEQ ID NO: 260 - RNA, 21 nt, synthetic construct
  modified_base 1: mod_base = gm
  modified_base 2: mod_base = um
  modified_base 3: mod_base = cm
  modified_base 4: mod_base = cm
  modified_base 5: mod_base = OTHER; note = 2'-O-methyladenosine
  modified_base 6: mod_base = OTHER; note = 2'-O-methyladenosine
  modified_base 7: mod_base = gm
  modified_base 8: mod_base = OTHER; note = 2'-O-methyladenosine
  modified_base 9: mod_base = OTHER; note = 2'-fluorouridine
  modified_base 10: mod_base = gm
  modified_base 11: mod_base = OTHER; note = 2'-fluoroguanosine
  modified_base 12: mod_base = um
  modified_base 13: mod_base = OTHER; note = 2'-fluoroadenosine
  modified_base 14: mod_base = um
  modified_base 15: mod_base = um
  modified_base 16: mod_base = um
  modified_base 17: mod_base = cm
  modified_base 18: mod_base = um
  modified_base 19: mod_base = OTHER; note = 2'-O-methyladenosine
  modified_base 20: mod_base = cm
  modified_base 21: mod_base = um
  source 1..21: mol_type = other RNA
gtccaagatggtatttctact

SEQ ID NO: 261 - RNA, 21 nt, synthetic construct
  modified_base 1: mod_base = gm
  modified_base 2: mod_base = um
  modified_base 3: mod_base = cm
  modified_base 4: mod_base = cm
  modified_base 5: mod_base = OTHER; note = 2'-O-methyladenosine
  modified_base 6: mod_base = OTHER; note = 2'-O-methyladenosine
  modified_base 7: mod_base = gm
  modified_base 8: mod_base = OTHER; note = 2'-O-methyladenosine
  modified_base 9: mod_base = OTHER; note = 2'-fluorouridine
  modified_base 10: mod_base = gm
  modified_base 11: mod_base = OTHER; note = 2'-fluoroguanosine
  modified_base 12: mod_base = um
  modified_base 13: mod_base = OTHER; note = 2'-fluoroadenosine
  modified_base 14: mod_base = um
  modified_base 15: mod_base = um
  modified_base 16: mod_base = um
  modified_base 17: mod_base = cm
  modified_base 18: mod_base = um
  modified_base 19: mod_base = OTHER; note = 2'-O-methyladenosine
  modified_base 20: mod_base = cm
  modified_base 21: mod_base = OTHER; note = 2'-O-methyladenosine
  source 1..21: mol_type = other RNA
gtccaagatggtatttctaca

SEQ ID NO: 262 - RNA, 21 nt, synthetic construct
  modified_base 1: mod_base = gm
  modified_base 2: mod_base = gm
  modified_base 3: mod_base = OTHER; note = 2'-O-methyladenosine
  modified_base 4: mod_base = cm
  modified_base 5: mod_base = OTHER; note = 2'-O-methyladenosine
  modified_base 6: mod_base = OTHER; note = 2'-O-methyladenosine
  modified_base 7: mod_base = gm
  modified_base 8: mod_base = gm
  modified_base 9: mod_base = OTHER; note = 2'-fluoroadenosine
  modified_base 10: mod_base = OTHER; note = 2'-O-methyladenosine
  modified_base 11: mod_base = OTHER; note = 2'-fluorocytidine
  modified_base 12: mod_base = um
  modified_base 13: mod_base = OTHER; note = 2'-fluoroguanosine
  modified_base 14: mod_base = OTHER; note = 2'-O-methyladenosine
  modified_base 15: mod_base = um
  modified_base 16: mod_base = um
  modified_base 17: mod_base = OTHER; note = 2'-O-methyladenosine
  modified_base 18: mod_base = cm
  modified_base 19: mod_base = OTHER; note = 2'-O-methyladenosine
  modified_base 20: mod_base = OTHER; note = 2'-O-methyladenosine
  modified_base 21: mod_base = OTHER; note = 2'-O-methyladenosine
  source 1..21: mol_type = other RNA
ggacaaggaactgattacaaa

SEQ ID NO: 263 - RNA, 21 nt, synthetic construct
  modified_base 1: mod_base = cm
  modified_base 2: mod_base = gm
  modified_base 3: mod_base = OTHER; note = 2'-O-methyladenosine
  modified_base 4: mod_base = cm
  modified_base 5: mod_base = OTHER; note = 2'-O-methyladenosine
  modified_base 6: mod_base = OTHER; note = 2'-O-methyladenosine
  modified_base 7: mod_base = gm
  modified_base 8: mod_base = gm
  modified_base 9: mod_base = OTHER; note = 2'-fluoroadenosine
  modified_base 10: mod_base = OTHER; note = 2'-O-methyladenosine
  modified_base 11: mod_base = OTHER; note = 2'-fluorocytidine
  modified_base 12: mod_base = um
  modified_base 13: mod_base = OTHER; note = 2'-fluoroguanosine
  modified_base 14: mod_base = OTHER; note = 2'-O-methyladenosine
  modified_base 15: mod_base = um
  modified_base 16: mod_base = um
  modified_base 17: mod_base = OTHER; note = 2'-O-methyladenosine
  modified_base 18: mod_base = cm
  modified_base 19: mod_base = OTHER; note = 2'-O-methyladenosine
  modified_base 20: mod_base = OTHER; note = 2'-O-methyladenosine
  modified_base 21: mod_base = OTHER; note = 2'-O-methyladenosine
  source 1..21: mol_type = other RNA
cgacaaggaactgattacaaa

SEQ ID NO: 264 - RNA, 21 nt, synthetic construct
  modified_base 1: mod_base = cm
  modified_base 2: mod_base = OTHER; note = 2'-O-methyladenosine
  modified_base 3: mod_base = um
  modified_base 4: mod_base = OTHER; note = 2'-O-methyladenosine
  modified_base 5: mod_base = OTHER; note = 2'-O-methyladenosine
  modified_base 6: mod_base = um
  modified_base 7: mod_base = cm
  modified_base 8: mod_base = OTHER; note = 2'-O-methyladenosine
  modified_base 9: mod_base = OTHER; note = 2'-fluoroguanosine
  modified_base 10: mod_base = OTHER; note = 2'-fluoroguanosine
  modified_base 11: mod_base = OTHER; note = 2'-fluoroadenosine
  modified_base 12: mod_base = um
  modified_base 13: mod_base = gm
  modified_base 14: mod_base = um
  modified_base 15: mod_base = OTHER; note = 2'-O-methyladenosine
  modified_base 16: mod_base = OTHER; note = 2'-O-methyladenosine
  modified_base 17: mod_base = OTHER; note = 2'-O-methyladenosine
  modified_base 18: mod_base = cm
  modified_base 19: mod_base = um
  modified_base 20: mod_base = um
  modified_base 21: mod_base = OTHER; note = 2'-O-methyladenosine
  source 1..21: mol_type = other RNA
cataatcaggatgtaaactta

SEQ ID NO: 265 - RNA, 21 nt, synthetic construct
  modified_base 1: mod_base = cm
  modified_base 2: mod_base = OTHER; note = 2'-O-methyladenosine
  modified_base 3: mod_base = um
  modified_base 4: mod_base = OTHER; note = 2'-O-methyladenosine
  modified_base 5: mod_base = OTHER; note = 2'-O-methyladenosine
  modified_base 6: mod_base = um
  modified_base 7: mod_base = cm
  modified_base 8: mod_base = OTHER; note = 2'-O-methyladenosine
  modified_base 9: mod_base = OTHER; note = 2'-fluoroguanosine
  modified_base 10: mod_base = gm
  modified_base 11: mod_base = OTHER; note = 2'-fluoroadenosine
  modified_base 12: mod_base = um
  modified_base 13: mod_base = OTHER; note = 2'-fluoroguanosine
  modified_base 14: mod_base = um
  modified_base 15: mod_base = OTHER; note = 2'-O-methyladenosine
  modified_base 16: mod_base = OTHER; note = 2'-O-methyladenosine
  modified_base 17: mod_base = OTHER; note = 2'-O-methyladenosine
  modified_base 18: mod_base = cm
  modified_base 19: mod_base = um
  modified_base 20: mod_base = um
  modified_base 21: mod_base = OTHER; note = 2'-O-methyladenosine
  source 1..21: mol_type = other RNA
cataatcaggatgtaaactta

SEQ ID NO: 266 - RNA, 21 nt, synthetic construct
  modified_base 1: mod_base = cm
  modified_base 2: mod_base = gm
  modified_base 3: mod_base = um
  modified_base 4: mod_base = OTHER; note = 2'-O-methyladenosine
  modified_base 5: mod_base = OTHER; note = 2'-O-methyladenosine
  modified_base 6: mod_base = um
  modified_base 7: mod_base = cm
  modified_base 8: mod_base = OTHER; note = 2'-O-methyladenosine
  modified_base 9: mod_base = OTHER; note = 2'-fluoroguanosine
  modified_base 10: mod_base = gm
  modified_base 11: mod_base = OTHER; note = 2'-fluoroadenosine
  modified_base 12: mod_base = um
  modified_base 13: mod_base = OTHER; note = 2'-fluoroguanosine
  modified_base 14: mod_base = um
  modified_base 15: mod_base = OTHER; note = 2'-O-methyladenosine
  modified_base 16: mod_base = OTHER; note = 2'-O-methyladenosine
  modified_base 17: mod_base = OTHER; note = 2'-O-methyladenosine
  modified_base 18: mod_base = cm
  modified_base 19: mod_base = um
  modified_base 20: mod_base = um
  modified_base 21: mod_base = OTHER; note = 2'-O-methyladenosine
  source 1..21: mol_type = other RNA
cgtaatcaggatgtaaactta

SEQ ID NO: 267 - RNA, 21 nt, synthetic construct
  modified_base 1: mod_base = gm
  modified_base 2: mod_base = gm
  modified_base 3: mod_base = OTHER; note = 2'-O-methyladenosine
  modified_base 4: mod_base = um
  modified_base 5: mod_base = gm
  modified_base 6: mod_base = um
  modified_base 7: mod_base = OTHER; note = 2'-O-methyladenosine
  modified_base 8: mod_base = OTHER; note = 2'-O-methyladenosine
  modified_base 9: mod_base = OTHER; note = 2'-fluoroadenosine
  modified_base 10: mod_base = OTHER; note = 2'-fluorocytidine
  modified_base 11: mod_base = OTHER; note = 2'-fluorouridine
  modified_base 12: mod_base = um
  modified_base 13: mod_base = OTHER; note = 2'-O-methyladenosine
  modified_base 14: mod_base = cm
  modified_base 15: mod_base = OTHER; note = 2'-O-methyladenosine
  modified_base 16: mod_base = um
  modified_base 17: mod_base = OTHER; note = 2'-O-methyladenosine
  modified_base 18: mod_base = gm
  modified_base 19: mod_base = cm
  modified_base 20: mod_base = um
  modified_base 21: mod_base = OTHER; note = 2'-O-methyladenosine
  source 1..21: mol_type = other RNA
ggatgtaaacttacatagcta

SEQ ID NO: 268 - RNA, 21 nt, synthetic construct
  modified_base 1: mod_base = gm
  modified_base 2: mod_base = gm
  modified_base 3: mod_base = OTHER; note = 2'-O-methyladenosine
  modified_base 4: mod_base = um
  modified_base 5: mod_base = gm
  modified_base 6: mod_base = um
  modified_base 7: mod_base = OTHER; note = 2'-O-methyladenosine
  modified_base 8: mod_base = OTHER; note = 2'-O-methyladenosine
  modified_base 9: mod_base = OTHER; note = 2'-fluoroadenosine
  modified_base 10: mod_base = cm
  modified_base 11: mod_base = OTHER; note = 2'-fluorouridine
  modified_base 12: mod_base = um
  modified_base 13: mod_base = OTHER; note = 2'-fluoroadenosine
  modified_base 14: mod_base = cm
  modified_base 15: mod_base = OTHER; note = 2'-O-methyladenosine
  modified_base 16: mod_base = um
  modified_base 17: mod_base = OTHER; note = 2'-O-methyladenosine
  modified_base 18: mod_base = gm
  modified_base 19: mod_base = cm
  modified_base 20: mod_base = um
  modified_base 21: mod_base = OTHER; note = 2'-O-methyladenosine
  source 1..21: mol_type = other RNA
ggatgtaaacttacatagcta

SEQ ID NO: 269 - RNA, 21 nt, synthetic construct
  modified_base 1: mod_base = gm
  modified_base 2: mod_base = cm
  modified_base 3: mod_base = OTHER; note = 2'-O-methyladenosine
  modified_base 4: mod_base = cm
  modified_base 5: mod_base = cm
  modified_base 6: mod_base = um
  modified_base 7: mod_base = um
  modified_base 8: mod_base = um
  modified_base 9: mod_base = OTHER; note = 2'-fluoroguanosine
  modified_base 10: mod_base = OTHER; note = 2'-O-methyladenosine
  modified_base 11: mod_base = OTHER; note = 2'-fluorocytidine
  modified_base 12: mod_base = OTHER; note = 2'-O-methyladenosine
  modified_base 13: mod_base = OTHER; note = 2'-fluoroadenosine
  modified_base 14: mod_base = um
  modified_base 15: mod_base = cm
  modified_base 16: mod_base = um
  modified_base 17: mod_base = um
  modified_base 18: mod_base = OTHER; note = 2'-O-methyladenosine
  modified_base 19: mod_base = OTHER; note = 2'-O-methyladenosine
  modified_base 20: mod_base = gm
  modified_base 21: mod_base = OTHER; note = 2'-O-methyladenosine
  source 1..21: mol_type = other RNA
gcacctttgacaatcttaaga

SEQ ID NO: 270 - RNA, 21 nt, synthetic construct
  modified_base 1: mod_base = um
  modified_base 2: mod_base = gm
  modified_base 3: mod_base = cm
  modified_base 4: mod_base = um
  modified_base 5: mod_base = gm
  modified_base 6: mod_base = um
  modified_base 7: mod_base = gm
  modified_base 8: mod_base = gm
  modified_base 9: mod_base = OTHER; note = 2'-fluorouridine
  modified_base 10: mod_base = OTHER; note = 2'-fluorouridine
  modified_base 11: mod_base = OTHER; note = 2'-fluoroadenosine
  modified_base 12: mod_base = um
  modified_base 13: mod_base = OTHER; note = 2'-O-methyladenosine
  modified_base 14: mod_base = cm
  modified_base 15: mod_base = cm
  modified_base 16: mod_base = um
  modified_base 17: mod_base = OTHER; note = 2'-O-methyladenosine
  modified_base 18: mod_base = cm
  modified_base 19: mod_base = um
  modified_base 20: mod_base = OTHER; note = 2'-O-methyladenosine
  modified_base 21: mod_base = OTHER; note = 2'-O-methyladenosine
  source 1..21: mol_type = other RNA
tgctgtggttatacctactaa

SEQ ID NO: 271 - RNA, 21 nt, synthetic construct
  modified_base 1: mod_base = gm
  modified_base 2: mod_base = OTHER; note = 2'-O-methyladenosine
  modified_base 3: mod_base = cm
  modified_base 4: mod_base = OTHER; note = 2'-O-methyladenosine
  modified_base 5: mod_base = OTHER; note = 2'-O-methyladenosine
  modified_base 6: mod_base = um
  modified_base 7: mod_base = cm
  modified_base 8: mod_base = um
  modified_base 9: mod_base = OTHER; note = 2'-fluorouridine
  modified_base 10: mod_base = OTHER; note = 2'-fluoroadenosine
  modified_base 11: mod_base = OTHER; note = 2'-fluoroadenosine
  modified_base 12: mod_base = gm
  modified_base 13: mod_base = OTHER; note = 2'-O-methyladenosine
  modified_base 14: mod_base = cm
  modified_base 15: mod_base = OTHER; note = 2'-O-methyladenosine
  modified_base 16: mod_base = cm
  modified_base 17: mod_base = um
  modified_base 18: mod_base = um
  modified_base 19: mod_base = cm
  modified_base 20: mod_base = um
  modified_base 21: mod_base = um
  source 1..21: mol_type = other RNA
gacaatcttaagacacttctt

SEQ ID NO: 272 - RNA, 21 nt, synthetic construct
  modified_base 1: mod_base = cm
  modified_base 2: mod_base = OTHER; note = 2'-O-methyladenosine
  modified_base 3: mod_base = um
  modified_base 4: mod_base = gm
  modified_base 5: mod_base = gm
  modified_base 6: mod_base = gm
  modified_base 7: mod_base = cm
  modified_base 8: mod_base = OTHER; note = 2'-O-methyladenosine
  modified_base 9: mod_base = OTHER; note = 2'-fluorocytidine
  modified_base 10: mod_base = OTHER; note = 2'-fluoroadenosine
  modified_base 11: mod_base = OTHER; note = 2'-fluorocytidine
  modified_base 12: mod_base = um
  modified_base 13: mod_base = um
  modified_base 14: mod_base = um
  modified_base 15: mod_base = cm
  modified_base 16: mod_base = um
  modified_base 17: mod_base = um
  modified_base 18: mod_base = OTHER; note = 2'-O-methyladenosine
  modified_base 19: mod_base = um
  modified_base 20: mod_base = gm
  modified_base 21: mod_base = OTHER; note = 2'-O-methyladenosine
  source 1..21: mol_type = other RNA
catgggcacactttcttatga

SEQ ID NO: 273 - RNA, 21 nt, synthetic construct
  modified_base 1: mod_base = OTHER; note = 2'-O-methyladenosine
  modified_base 2: mod_base = cm
  modified_base 3: mod_base = OTHER; note = 2'-O-methyladenosine
  modified_base 4: mod_base = gm
  modified_base 5: mod_base = OTHER; note = 2'-O-methyladenosine
  modified_base 6: mod_base = OTHER; note = 2'-O-methyladenosine
  modified_base 7: mod_base = OTHER; note = 2'-O-methyladenosine
  modified_base 8: mod_base = um
  modified_base 9: mod_base = OTHER; note = 2'-fluorouridine
  modified_base 10: mod_base = OTHER; note = 2'-fluoroguanosine
  modified_base 11: mod_base = OTHER; note = 2'-fluoroadenosine
  modified_base 12: mod_base = cm
  modified_base 13: mod_base = cm
  modified_base 14: mod_base = cm
  modified_base 15: mod_base = um
  modified_base 16: mod_base = OTHER; note = 2'-O-methyladenosine
  modified_base 17: mod_base = OTHER; note = 2'-O-methyladenosine
  modified_base 18: mod_base = gm
  modified_base 19: mod_base = um
  modified_base 20: mod_base = um
  modified_base 21: mod_base = OTHER; note = 2'-O-methyladenosine
  source 1..21: mol_type = other RNA
acagaaattgaccctaagtta

SEQ ID NO: 274 - RNA, 21 nt, synthetic construct
  modified_base 1: mod_base = gm
  modified_base 2: mod_base = OTHER; note = 2'-O-methyladenosine
  modified_base 3: mod_base = um
  modified_base 4: mod_base = gm
  modified_base 5: mod_base = cm
  modified_base 6: mod_base = um
  modified_base 7: mod_base = um
  modified_base 8: mod_base = OTHER; note = 2'-O-methyladenosine
  modified_base 9: mod_base = OTHER; note = 2'-fluorocytidine
  modified_base 10: mod_base = OTHER; note = 2'-fluoroguanosine
  modified_base 11: mod_base = OTHER; note = 2'-fluorouridine
  modified_base 12: mod_base = um
  modified_base 13: mod_base = OTHER; note = 2'-O-methyladenosine
  modified_base 14: mod_base = OTHER; note = 2'-O-methyladenosine
  modified_base 15: mod_base = um
  modified_base 16: mod_base = OTHER; note = 2'-O-methyladenosine
  modified_base 17: mod_base = cm
  modified_base 18: mod_base = gm
  modified_base 19: mod_base = um
  modified_base 20: mod_base = um
  modified_base 21: mod_base = um
  source 1..21: mol_type = other RNA
gatgcttacgttaatacgttt

SEQ ID NO: 275 - RNA, 21 nt, synthetic construct
  modified_base 1: mod_base = cm
  modified_base 2: mod_base = OTHER; note = 2'-O-methyladenosine
  modified_base 3: mod_base = OTHER; note = 2'-O-methyladenosine
  modified_base 4: mod_base = gm
  modified_base 5: mod_base = cm
  modified_base 6: mod_base = um
  modified_base 7: mod_base = OTHER; note = 2'-O-methyladenosine
  modified_base 8: mod_base = um
  modified_base 9: mod_base = OTHER; note = 2'-fluoroguanosine
  modified_base 10: mod_base = OTHER; note = 2'-fluoroadenosine
  modified_base 11: mod_base = OTHER; note = 2'-fluorocytidine
  modified_base 12: mod_base = cm
  modified_base 13: mod_base = cm
  modified_base 14: mod_base = OTHER; note = 2'-O-methyladenosine
  modified_base 15: mod_base = OTHER; note = 2'-O-methyladenosine
  modified_base 16: mod_base = OTHER; note = 2'-O-methyladenosine
  modified_base 17: mod_base = um
  modified_base 18: mod_base = gm
  modified_base 19: mod_base = um
  modified_base 20: mod_base = OTHER; note = 2'-O-methyladenosine
  modified_base 21: mod_base = um
  source 1..21: mol_type = other RNA
caagctatgacccaaatgtat

SEQ ID NO: 276 - RNA, 21 nt, synthetic construct
  modified_base 1: mod_base = um
  modified_base 2: mod_base = gm
  modified_base 3: mod_base = um
  modified_base 4: mod_base = cm
  modified_base 5: mod_base = gm
  modified_base 6: mod_base = OTHER; note = 2'-O-methyladenosine
  modified_base 7: mod_base = um
  modified_base 8: mod_base = um
  modified_base 9: mod_base = OTHER; note = 2'-fluorocytidine
  modified_base 10: mod_base = OTHER; note = 2'-fluoroadenosine
  modified_base 11: mod_base = OTHER; note = 2'-fluoroguanosine
  modified_base 12: mod_base = OTHER; note = 2'-O-methyladenosine
  modified_base 13: mod_base = um
  modified_base 14: mod_base = cm
  modified_base 15: mod_base = um
  modified_base 16: mod_base = um
  modified_base 17: mod_base = OTHER; note = 2'-O-methyladenosine
  modified_base 18: mod_base = OTHER; note = 2'-O-methyladenosine
  modified_base 19: mod_base = um
  modified_base 20: mod_base = gm
  modified_base 21: mod_base = OTHER; note = 2'-O-methyladenosine
  source 1..21: mol_type = other RNA
tgtcgattcagatcttaatga

SEQ ID NO: 277 - RNA, 21 nt, synthetic construct
  modified_base 1: mod_base = gm
  modified_base 2: mod_base = cm
  modified_base 3: mod_base = um
  modified_base 4: mod_base = um
  modified_base 5: mod_base = gm
  modified_base 6: mod_base = cm
  modified_base 7: mod_base = um
  modified_base 8: mod_base = um
  modified_base 9: mod_base = OTHER; note = 2'-fluorouridine
  modified_base 10: mod_base = OTHER; note = 2'-fluorocytidine
  modified_base 11: mod_base = OTHER; note = 2'-fluoroguanosine
  modified_base 12: mod_base = um
  modified_base 13: mod_base = gm
  modified_base 14: mod_base = gm
  modified_base 15: mod_base = um
  modified_base 16: mod_base = OTHER; note = 2'-O-methyladenosine
  modified_base 17: mod_base = um
  modified_base 18: mod_base = um
  modified_base 19: mod_base = cm
  modified_base 20: mod_base = um
  modified_base 21: mod_base = um
  source 1..21: mol_type = other RNA
gcttgctttcgtggtattctt

SEQ ID NO: 278 - RNA, 21 nt, synthetic construct
  modified_base 1: mod_base = OTHER; note = 2'-O-methyladenosine
  modified_base 2: mod_base = gm
  modified_base 3: mod_base = OTHER; note = 2'-O-methyladenosine
  modified_base 4: mod_base = cm
  modified_base 5: mod_base = OTHER; note = 2'-O-methyladenosine
  modified_base 6: mod_base = OTHER; note = 2'-O-methyladenosine
  modified_base 7: mod_base = gm
  modified_base 8: mod_base = gm
  modified_base 9: mod_base = OTHER; note = 2'-fluoroadenosine
  modified_base 10: mod_base = OTHER; note = 2'-O-methyladenosine
  modified_base 11: mod_base = OTHER; note = 2'-fluorocytidine
  modified_base 12: mod_base = um
  modified_base 13: mod_base = OTHER; note = 2'-fluoroguanosine
  modified_base 14: mod_base = OTHER; note = 2'-O-methyladenosine
  modified_base 15: mod_base = um
  modified_base 16: mod_base = um
  modified_base 17: mod_base = OTHER; note = 2'-O-methyladenosine
  modified_base 18: mod_base = cm
  modified_base 19: mod_base = OTHER; note = 2'-O-methyladenosine
  modified_base 20: mod_base = OTHER; note = 2'-O-methyladenosine
  modified_base 21: mod_base = OTHER; note = 2'-O-methyladenosine
  source 1..21: mol_type = other RNA
agacaaggaactgattacaaa

SEQ ID NO: 279 - RNA, 21 nt, synthetic construct
  modified_base 1: mod_base = cm
  modified_base 2: mod_base = gm
  modified_base 3: mod_base = um
  modified_base 4: mod_base = OTHER; note = 2'-O-methyladenosine
  modified_base 5: mod_base = OTHER; note = 2'-O-methyladenosine
  modified_base 6: mod_base = um
  modified_base 7: mod_base = cm
  modified_base 8: mod_base = OTHER; note = 2'-O-methyladenosine
  modified_base 9: mod_base = OTHER; note = 2'-fluoroguanosine
  modified_base 10: mod_base = OTHER; note = 2'-fluoroguanosine
  modified_base 11: mod_base = OTHER; note = 2'-fluoroadenosine
  modified_base 12: mod_base = um
  modified_base 13: mod_base = gm
  modified_base 14: mod_base = um
  modified_base 15: mod_base = OTHER; note = 2'-O-methyladenosine
  modified_base 16: mod_base = OTHER; note = 2'-O-methyladenosine
  modified_base 17: mod_base = OTHER; note = 2'-O-methyladenosine
  modified_base 18: mod_base = cm
  modified_base 19: mod_base = um
  modified_base 20: mod_base = um
  modified_base 21: mod_base = OTHER; note = 2'-O-methyladenosine
  source 1..21: mol_type = other RNA
cgtaatcaggatgtaaactta

SEQ ID NO: 280 - RNA, 21 nt, synthetic construct
  modified_base 1: mod_base = cm
  modified_base 1^2: mod_base = OTHER; note = phosphorothioate linkage
  modified_base 2: mod_base = gm
  modified_base 3: mod_base = OTHER; note = 2'-O-methyladenosine
  modified_base 4: mod_base = OTHER; note = 2'-O-methyladenosine
  modified_base 5: mod_base = gm
  modified_base 6: mod_base = um
  modified_base 7: mod_base = OTHER; note = 2'-O-methyladenosine
  modified_base 8: mod_base = gm
  modified_base 9: mod_base = OTHER; note = 2'-fluorouridine
  modified_base 10: mod_base = gm
  modified_base 11: mod_base = OTHER; note = 2'-fluoroguanosine
  modified_base 12: mod_base = OTHER; note = 2'-O-methyladenosine
  modified_base 13: mod_base = OTHER; note = 2'-fluoroadenosine
  modified_base 14: mod_base = OTHER; note = 2'-O-methyladenosine
  modified_base 15: mod_base = OTHER; note = 2'-O-methyladenosine
  modified_base 16: mod_base = um
  modified_base 17: mod_base = cm
  modified_base 18: mod_base = cm
  modified_base 19: mod_base = um
  modified_base 20: mod_base = OTHER; note = 2'-O-methyladenosine
  modified_base 21: mod_base = OTHER; note = 2'-O-methyladenosine
  source 1..21: mol_type = other RNA
cgaagtagtggaaaatcctaa

SEQ ID NO: 281 - RNA, 21 nt, synthetic construct
  modified_base 1: mod_base = gm
  modified_base 1^2: mod_base = OTHER; note = phosphorothioate linkage
  modified_base 2: mod_base = gm
  modified_base 3: mod_base = OTHER; note = 2'-O-methyladenosine
  modified_base 4: mod_base = cm
  modified_base 5: mod_base = OTHER; note = 2'-O-methyladenosine
  modified_base 6: mod_base = OTHER; note = 2'-O-methyladenosine
  modified_base 7: mod_base = gm
  modified_base 8: mod_base = gm
  modified_base 9: mod_base = OTHER; note = 2'-fluoroadenosine
  modified_base 10: mod_base = OTHER; note = 2'-O-methyladenosine
  modified_base 11: mod_base = OTHER; note = 2'-fluorocytidine
  modified_base 12: mod_base = um
  modified_base 13: mod_base = OTHER; note = 2'-fluoroguanosine
  modified_base 14: mod_base = OTHER; note = 2'-O-methyladenosine
  modified_base 15: mod_base = um
  modified_base 16: mod_base = um
  modified_base 17: mod_base = OTHER; note = 2'-O-methyladenosine
  modified_base 18: mod_base = cm
  modified_base 19: mod_base = OTHER; note = 2'-O-methyladenosine
  modified_base 20: mod_base = OTHER; note = 2'-O-methyladenosine
  modified_base 21: mod_base = OTHER; note = 2'-O-methyladenosine
  source 1..21: mol_type = other RNA
ggacaaggaactgattacaaa

SEQ ID NO: 282 - RNA, 21 nt, synthetic construct
  modified_base 1: mod_base = um
  modified_base 1^2: mod_base = OTHER; note = phosphorothioate linkage
  modified_base 2: mod_base = gm
  modified_base 3: mod_base = cm
  modified_base 4: mod_base = um
  modified_base 5: mod_base = gm
  modified_base 6: mod_base = um
  modified_base 7: mod_base = gm
  modified_base 8: mod_base = gm
  modified_base 9: mod_base = OTHER; note = 2'-fluorouridine
  modified_base 10: mod_base = OTHER; note = 2'-fluorouridine
  modified_base 11: mod_base = OTHER; note = 2'-fluoroadenosine
  modified_base 12: mod_base = um
  modified_base 13: mod_base = OTHER; note = 2'-O-methyladenosine
  modified_base 14: mod_base = cm
  modified_base 15: mod_base = cm
  modified_base 16: mod_base = um
  modified_base 17: mod_base = OTHER; note = 2'-O-methyladenosine
  modified_base 18: mod_base = cm
  modified_base 19: mod_base = um
  modified_base 20: mod_base = OTHER; note = 2'-O-methyladenosine
  modified_base 21: mod_base = OTHER; note = 2'-O-methyladenosine
  source 1..21: mol_type = other RNA
tgctgtggttatacctactaa

SEQ ID NO: 283 - RNA, 21 nt, synthetic construct
  modified_base 1: mod_base = cm
  modified_base 1^2: mod_base = OTHER; note = phosphorothioate linkage
  modified_base 2: mod_base = OTHER; note = 2'-O-methyladenosine
  modified_base 3: mod_base = um
  modified_base 4: mod_base = OTHER; note = 2'-O-methyladenosine
  modified_base 5: mod_base = cm
  modified_base 6: mod_base = OTHER; note = 2'-O-methyladenosine
  modified_base 7: mod_base = OTHER; note = 2'-O-methyladenosine
  modified_base 8: mod_base = um
  modified_base 9: mod_base = OTHER; note = 2'-fluoroguanosine
  modified_base 10: mod_base = cm
  modified_base 11: mod_base = OTHER; note = 2'-fluorouridine
  modified_base 12: mod_base = OTHER; note = 2'-O-methyladenosine
  modified_base 13: mod_base = OTHER; note = 2'-fluoroguanosine
  modified_base 14: mod_base = um
  modified_base 15: mod_base = um
  modified_base 16: mod_base = OTHER; note = 2'-O-methyladenosine
  modified_base 17: mod_base = OTHER; note = 2'-O-methyladenosine
  modified_base 18: mod_base = OTHER; note = 2'-O-methyladenosine
  modified_base 19: mod_base = cm
  modified_base 20: mod_base = OTHER; note = 2'-O-methyladenosine
  modified_base 21: mod_base = OTHER; note = 2'-O-methyladenosine
  source 1..21: mol_type = other RNA
catacaatgctagttaaacaa

SEQ ID NO: 284 - RNA, 21 nt, synthetic construct
  modified_base 1: mod_base = cm
  modified_base 1^2: mod_base = OTHER; note = phosphorothioate linkage
  modified_base 2: mod_base = gm
  modified_base 3: mod_base = um
  modified_base 4: mod_base = OTHER; note = 2'-O-methyladenosine
  modified_base 5: mod_base = OTHER; note = 2'-O-methyladenosine
  modified_base 6: mod_base = um
  modified_base 7: mod_base = cm
  modified_base 8: mod_base = OTHER; note = 2'-O-methyladenosine
  modified_base 9: mod_base = OTHER; note = 2'-fluoroguanosine
  modified_base 10: mod_base = gm
  modified_base 11: mod_base = OTHER; note = 2'-fluoroadenosine
  modified_base 12: mod_base = um
  modified_base 13: mod_base = OTHER; note = 2'-fluoroguanosine
  modified_base 14: mod_base = um
  modified_base 15: mod_base = OTHER; note = 2'-O-methyladenosine
  modified_base 16: mod_base = OTHER; note = 2'-O-methyladenosine
  modified_base 17: mod_base = OTHER; note = 2'-O-methyladenosine
  modified_base 18: mod_base = cm
  modified_base 19: mod_base = um
  modified_base 20: mod_base = um
  modified_base 21: mod_base = OTHER; note = 2'-O-methyladenosine
  source 1..21: mol_type = other RNA
cgtaatcaggatgtaaactta

SEQ ID NO: 285 - RNA, 21 nt, synthetic construct
  modified_base 1: mod_base = um
  modified_base 2: mod_base = gm
  modified_base 3: mod_base = cm
  modified_base 4: mod_base = um
  modified_base 5: mod_base = gm
  modified_base 6: mod_base = um
  modified_base 7: mod_base = gm
  modified_base 8: mod_base = gm
  modified_base 9: mod_base = OTHER; note = 2'-fluorouridine
  modified_base 10: mod_base = um
  modified_base 11: mod_base = OTHER; note = 2'-fluoroadenosine
  modified_base 12: mod_base = um
  modified_base 13: mod_base = OTHER; note = 2'-fluoroadenosine
  modified_base 14: mod_base = cm
  modified_base 15: mod_base = cm
  modified_base 16: mod_base = um
  modified_base 17: mod_base = OTHER; note = 2'-O-methyladenosine
  modified_base 18: mod_base = cm
  modified_base 19: mod_base = um
  modified_base 20: mod_base = OTHER; note = 2'-O-methyladenosine
  modified_base 21: mod_base = OTHER; note = 2'-O-methyladenosine
  source 1..21: mol_type = other RNA
tgctgtggttatacctactaa

SEQ ID NO: 286 - RNA, 21 nt, synthetic construct
  modified_base 1: mod_base = um
  modified_base 2: mod_base = gm
  modified_base 3: mod_base = cm
  modified_base 4: mod_base = um
  modified_base 5: mod_base = gm
  modified_base 6: mod_base = um
  modified_base 7: mod_base = gm
  modified_base 8: mod_base = gm
  modified_base 9: mod_base = OTHER; note = 2'-fluorouridine
  modified_base 10: mod_base = um
  modified_base 11: mod_base = OTHER; note = 2'-fluoroadenosine
  modified_base 12: mod_base = OTHER; note = 2'-fluorouridine
  modified_base 13: mod_base = OTHER; note = 2'-O-methyladenosine
  modified_base 14: mod_base = cm
  modified_base 15: mod_base = cm
  modified_base 16: mod_base = um
  modified_base 17: mod_base = OTHER; note = 2'-O-methyladenosine
  modified_base 18: mod_base = cm
  modified_base 19: mod_base = um
  modified_base 20: mod_base = OTHER; note = 2'-O-methyladenosine
  modified_base 21: mod_base = OTHER; note = 2'-O-methyladenosine
  source 1..21: mol_type = other RNA
tgctgtggttatacctactaa

SEQ ID NO: 287 - RNA, 21 nt, synthetic construct
  modified_base 1: mod_base = cm
  modified_base 2: mod_base = gm
  modified_base 3: mod_base = OTHER; note = 2'-O-methyladenosine
  modified_base 4: mod_base = cm
  modified_base 5: mod_base = OTHER; note = 2'-O-methyladenosine
  modified_base 6: mod_base = OTHER; note = 2'-O-methyladenosine
  modified_base 7: mod_base = gm
  modified_base 8: mod_base = gm
  modified_base 9: mod_base = OTHER; note = 2'-fluoroadenosine
  modified_base 10: mod_base = OTHER; note = 2'-fluoroadenosine
  modified_base 11: mod_base = OTHER; note = 2'-fluorocytidine
  modified_base 12: mod_base = um
  modified_base 13: mod_base = gm
  modified_base 14: mod_base = OTHER; note = 2'-O-methyladenosine
  modified_base 15: mod_base = um
  modified_base 16: mod_base = um
  modified_base 17: mod_base = OTHER; note = 2'-O-methyladenosine
  modified_base 18: mod_base = cm
  modified_base 19: mod_base = OTHER; note = 2'-O-methyladenosine
  modified_base 20: mod_base = OTHER; note = 2'-O-methyladenosine
  modified_base 21: mod_base = OTHER; note = 2'-O-methyladenosine
  source 1..21: mol_type = other RNA
cgacaaggaactgattacaaa

SEQ ID NO: 288 - RNA, 21 nt, synthetic construct
  modified_base 1: mod_base = um
  modified_base 2: mod_base = gm
  modified_base 3: mod_base = cm
  modified_base 4: mod_base = um
  modified_base 5: mod_base = gm
  modified_base 6: mod_base = um
  modified_base 7: mod_base = gm
  modified_base 8: mod_base = gm
  modified_base 9: mod_base = OTHER; note = 2'-fluorouridine
  modified_base 10: mod_base = um
  modified_base 11: mod_base = OTHER; note = 2'-fluoroadenosine
  modified_base 12: mod_base = um
  modified_base 13: mod_base = OTHER; note = 2'-O-methyladenosine
  modified_base 14: mod_base = cm
  modified_base 15: mod_base = cm
  modified_base 16: mod_base = um
  modified_base 17: mod_base = OTHER; note = 2'-O-methyladenosine
  modified_base 18: mod_base = cm
  modified_base 19: mod_base = um
  modified_base 20: mod_base = OTHER; note = 2'-O-methyladenosine
  modified_base 21: mod_base = OTHER; note = 2'-O-methyladenosine
  source 1..21: mol_type = other RNA
tgctgtggttatacctactaa

SEQ ID NO: 289 - RNA, 21 nt, synthetic construct
  modified_base 1: mod_base = gm
  modified_base 2: mod_base = gm
  modified_base 3: mod_base = OTHER; note = 2'-O-methyladenosine
  modified_base 4: mod_base = cm
  modified_base 5: mod_base = OTHER; note = 2'-O-methyladenosine
  modified_base 6: mod_base = OTHER; note = 2'-O-methyladenosine
  modified_base 7: mod_base = gm
  modified_base 8: mod_base = gm
  modified_base 9: mod_base = OTHER; note = 2'-fluoroadenosine
  modified_base 10: mod_base = OTHER; note = 2'-O-methyladenosine
  modified_base 11: mod_base = OTHER; note = 2'-fluorocytidine
  modified_base 12: mod_base = um
  modified_base 13: mod_base = gm
  modified_base 14: mod_base = OTHER; note = 2'-O-methyladenosine
  modified_base 15: mod_base = um
  modified_base 16: mod_base = um
  modified_base 17: mod_base = OTHER; note = 2'-O-methyladenosine
  modified_base 18: mod_base = cm
  modified_base 19: mod_base = OTHER; note = 2'-O-methyladenosine
  modified_base 20: mod_base = OTHER; note = 2'-O-methyladenosine
  modified_base 21: mod_base = OTHER; note = 2'-O-methyladenosine
  source 1..21: mol_type = other RNA
ggacaaggaactgattacaaa

SEQ ID NO: 290 - RNA, 21 nt, synthetic construct
  modified_base 1: mod_base = um
  modified_base 1^2: mod_base = OTHER; note = phosphorothioate linkage
  modified_base 2: mod_base = gm
  modified_base 3: mod_base = cm
  modified_base 4: mod_base = um
  modified_base 5: mod_base = gm
  modified_base 6: mod_base = um
  modified_base 7: mod_base = gm
  modified_base 8: mod_base = gm
  modified_base 9: mod_base = OTHER; note = 2'-fluorouridine
  modified_base 10: mod_base = um
  modified_base 11: mod_base = OTHER; note = 2'-fluoroadenosine
  modified_base 12: mod_base = um
  modified_base 13: mod_base = OTHER; note = 2'-O-methyladenosine
  modified_base 14: mod_base = cm
  modified_base 15: mod_base = cm
  modified_base 16: mod_base = um
  modified_base 17: mod_base = OTHER; note = 2'-O-methyladenosine
  modified_base 18: mod_base = cm
  modified_base 19: mod_base = um
  modified_base 20: mod_base = OTHER; note = 2'-O-methyladenosine
  modified_base 21: mod_base = OTHER; note = 2'-O-methyladenosine
  source 1..21: mol_type = other RNA
tgctgtggttatacctactaa

SEQ ID NO: 291 - RNA, 21 nt, synthetic construct
  modified_base 1: mod_base = gm
  modified_base 2: mod_base = OTHER; note = 2'-O-methyladenosine
  modified_base 3: mod_base = cm
  modified_base 4: mod_base = OTHER; note = 2'-O-methyladenosine
  modified_base 5: mod_base = cm
  modified_base 6: mod_base = OTHER; note = 2'-O-methyladenosine
  modified_base 7: mod_base = cm
  modified_base 8: mod_base = gm
  modified_base 9: mod_base = OTHER; note = 2'-fluorouridine
  modified_base 10: mod_base = OTHER; note = 2'-fluorocytidine
  modified_base 11: mod_base = OTHER; note = 2'-fluorocytidine
  modified_base 12: mod_base = OTHER; note = 2'-O-methyladenosine
  modified_base 13: mod_base = OTHER; note = 2'-O-methyladenosine
  modified_base 14: mod_base = cm
  modified_base 15: mod_base = um
  modified_base 16: mod_base = cm
  modified_base 17: mod_base = OTHER; note = 2'-O-methyladenosine
  modified_base 18: mod_base = gm
  modified_base 19: mod_base = um
  modified_base 20: mod_base = um
  modified_base 21: mod_base = um
  source 1..21: mol_type = other RNA
gacacacgtccaactcagttt

SEQ ID NO: 292 - RNA, 21 nt, synthetic construct
  modified_base 1: mod_base = gm
  modified_base 2: mod_base = gm
  modified_base 3: mod_base = OTHER; note = 2'-O-methyladenosine
  modified_base 4: mod_base = OTHER; note = 2'-O-methyladenosine
  modified_base 5: mod_base = gm
  modified_base 6: mod_base = OTHER; note = 2'-O-methyladenosine
  modified_base 7: mod_base = OTHER; note = 2'-O-methyladenosine
  modified_base 8: mod_base = gm
  modified_base 9: mod_base = OTHER; note = 2'-fluorouridine
  modified_base 10: mod_base = OTHER; note = 2'-fluoroadenosine
  modified_base 11: mod_base = OTHER; note = 2'-fluoroguanosine
  modified_base 12: mod_base = um
  modified_base 13: mod_base = gm
  modified_base 14: mod_base = gm
  modified_base 15: mod_base = OTHER; note = 2'-O-methyladenosine
  modified_base 16: mod_base = OTHER; note = 2'-O-methyladenosine
  modified_base 17: mod_base = OTHER; note = 2'-O-methyladenosine
  modified_base 18: mod_base = OTHER; note = 2'-O-methyladenosine
  modified_base 19: mod_base = um
  modified_base 20: mod_base = cm
  modified_base 21: mod_base = OTHER; note = 2'-O-methyladenosine
  source 1..21: mol_type = other RNA
ggaagaagtagtggaaaatca

SEQ ID NO: 293 - RNA, 21 nt, synthetic construct
  modified_base 1: mod_base = gm
  modified_base 2: mod_base = gm
  modified_base 3: mod_base = OTHER; note = 2'-O-methyladenosine
  modified_base 4: mod_base = OTHER; note = 2'-O-methyladenosine
  modified_base 5: mod_base = gm
  modified_base 6: mod_base = um
  modified_base 7: mod_base = OTHER; note = 2'-O-methyladenosine
  modified_base 8: mod_base = gm
  modified_base 9: mod_base = OTHER; note = 2'-fluorouridine
  modified_base 10: mod_base = OTHER; note = 2'-fluoroguanosine
  modified_base 11: mod_base = OTHER; note = 2'-fluoroguanosine
  modified_base 12: mod_base = OTHER; note = 2'-O-methyladenosine
  modified_base 13: mod_base = OTHER; note = 2'-O-methyladenosine
  modified_base 14: mod_base = OTHER; note = 2'-O-methyladenosine
  modified_base 15: mod_base = OTHER; note = 2'-O-methyladenosine
  modified_base 16: mod_base = um
  modified_base 17: mod_base = cm
  modified_base 18: mod_base = cm
  modified_base 19: mod_base = um
  modified_base 20: mod_base = OTHER; note = 2'-O-methyladenosine
  modified_base 21: mod_base = OTHER; note = 2'-O-methyladenosine
  source 1..21: mol_type = other RNA
ggaagtagtggaaaatcctaa

SEQ ID NO: 294 - RNA, 21 nt, synthetic construct
  modified_base 1: mod_base = gm
  modified_base 2: mod_base = um
  modified_base 3: mod_base = cm
  modified_base 4: mod_base = OTHER; note = 2'-O-methyladenosine
  modified_base 5: mod_base = um
  modified_base 6: mod_base = gm
  modified_base 7: mod_base = um
  modified_base 8: mod_base = gm
  modified_base 9: mod_base = OTHER; note = 2'-fluoroguanosine
  modified_base 10: mod_base = OTHER; note = 2'-fluorouridine
  modified_base 11: mod_base = OTHER; note = 2'-fluoroadenosine
  modified_base 12: mod_base = gm
  modified_base 13: mod_base = um
  modified_base 14: mod_base = gm
  modified_base 15: mod_base = um
  modified_base 16: mod_base = um
  modified_base 17: mod_base = OTHER; note = 2'-O-methylinosine
  modified_base 18: mod_base = gm
  modified_base 19: mod_base = um
  modified_base 20: mod_base = um
  modified_base 21: mod_base = um
  source 1..21: mol_type = other RNA
gtcatgtggtagtgttngttt

SEQ ID NO: 295 - RNA, 21 nt, synthetic construct
  modified_base 1: mod_base = cm
  modified_base 2: mod_base = OTHER; note = 2'-O-methyladenosine
  modified_base 3: mod_base = OTHER; note = 2'-O-methyladenosine
  modified_base 4: mod_base = gm
  modified_base 5: mod_base = cm
  modified_base 6: mod_base = um
  modified_base 7: mod_base = OTHER; note = 2'-O-methyladenosine
  modified_base 8: mod_base = um
  modified_base 9: mod_base = OTHER; note = 2'-fluoroguanosine
  modified_base 10: mod_base = OTHER; note = 2'-fluoroadenosine
  modified_base 11: mod_base = OTHER; note = 2'-fluorocytidine
  modified_base 12: mod_base = cm
  modified_base 13: mod_base = cm
  modified_base 14: mod_base = OTHER; note = 2'-O-methyladenosine
  modified_base 15: mod_base = OTHER; note = 2'-O-methyladenosine
  modified_base 16: mod_base = OTHER; note = 2'-O-methyladenosine
  modified_base 17: mod_base = um
  modified_base 18: mod_base = gm
  modified_base 19: mod_base = um
  modified_base 20: mod_base = OTHER; note = 2'-O-methyladenosine
  modified_base 21: mod_base = um
  source 1..21: mol_type = other RNA
caagctatgacccaaatgtat

SEQ ID NO: 296 - RNA, 21 nt, synthetic construct
  modified_base 1: mod_base = gm
  modified_base 2: mod_base = OTHER; note = 2'-O-methyladenosine
  modified_base 3: mod_base = cm
  modified_base 4: mod_base = OTHER; note = 2'-O-methyladenosine
  modified_base 5: mod_base = um
  modified_base 6: mod_base = gm
  modified_base 7: mod_base = gm
  modified_base 8: mod_base = um
  modified_base 9: mod_base = OTHER; note = 2'-fluoroadenosine
  modified_base 10: mod_base = OTHER; note = 2'-fluorocytidine
  modified_base 11: mod_base = OTHER; note = 2'-fluorocytidine
  modified_base 12: mod_base = OTHER; note = 2'-O-methyladenosine
  modified_base 13: mod_base = cm
  modified_base 14: mod_base = OTHER; note = 2'-O-methyladenosine
  modified_base 15: mod_base = um
  modified_base 16: mod_base = OTHER; note = 2'-O-methyladenosine
  modified_base 17: mod_base = um
  modified_base 18: mod_base = OTHER; note = 2'-O-methyladenosine
  modified_base 19: mod_base = um
  modified_base 20: mod_base = cm
  modified_base 21: mod_base = OTHER; note = 2'-O-methyladenosine
  source 1..21: mol_type = other RNA
gacatggtaccacatatatca

SEQ ID NO: 297 - RNA, 21 nt, synthetic construct
  modified_base 1: mod_base = gm
  modified_base 2: mod_base = cm
  modified_base 3: mod_base = OTHER; note = 2'-O-methyladenosine
  modified_base 4: mod_base = um
  modified_base 5: mod_base = gm
  modified_base 6: mod_base = gm
  modified_base 7: mod_base = um
  modified_base 8: mod_base = OTHER; note = 2'-O-methyladenosine
  modified_base 9: mod_base = OTHER; note = 2'-fluorocytidine
  modified_base 10: mod_base = OTHER; note = 2'-fluorocytidine
  modified_base 11: mod_base = OTHER; note = 2'-fluoroadenosine
  modified_base 12: mod_base = cm
  modified_base 13: mod_base = OTHER; note = 2'-O-methyladenosine
  modified_base 14: mod_base = um
  modified_base 15: mod_base = OTHER; note = 2'-O-methyladenosine
  modified_base 16: mod_base = um
  modified_base 17: mod_base = OTHER; note = 2'-O-methyladenosine
  modified_base 18: mod_base = um
  modified_base 19: mod_base = cm
  modified_base 20: mod_base = OTHER; note = 2'-O-methyladenosine
  modified_base 21: mod_base = OTHER; note = 2'-O-methyladenosine
  source 1..21: mol_type = other RNA
gcatggtaccacatatatcaa

SEQ ID NO: 298 - RNA, 21 nt, synthetic construct
  modified_base 1: mod_base = gm
  modified_base 2: mod_base = gm
  modified_base 3: mod_base = um
  modified_base 4: mod_base = OTHER; note = 2'-O-methyladenosine
  modified_base 5: mod_base = cm
  modified_base 6: mod_base = OTHER; note = 2'-O-methyladenosine
  modified_base 7: mod_base = um
  modified_base 8: mod_base = OTHER; note = 2'-O-methyladenosine
  modified_base 9: mod_base = OTHER; note = 2'-fluoroadenosine
  modified_base 10: mod_base = OTHER; note = 2'-fluorouridine
  modified_base 11: mod_base = OTHER; note = 2'-fluorocytidine
  modified_base 12: mod_base = OTHER; note = 2'-O-methyladenosine
  modified_base 13: mod_base = gm
  modified_base 14: mod_base = gm
  modified_base 15: mod_base = OTHER; note = 2'-O-methyladenosine
  modified_base 16: mod_base = um
  modified_base 17: mod_base = gm
  modified_base 18: mod_base = um
  modified_base 19: mod_base = OTHER; note = 2'-O-methyladenosine
  modified_base 20: mod_base = OTHER; note = 2'-O-methyladenosine
  modified_base 21: mod_base = OTHER; note = 2'-O-methyladenosine
  source 1..21: mol_type = other RNA
ggtacataatcaggatgtaaa

SEQ ID NO: 299 - RNA, 21 nt, synthetic construct
  modified_base 1: mod_base = gm
  modified_base 2: mod_base = cm
  modified_base 3: mod_base = OTHER; note = 2'-O-methyladenosine
  modified_base 4: mod_base = um
  modified_base 5: mod_base = OTHER; note = 2'-O-methyladenosine
  modified_base 6: mod_base = OTHER; note = 2'-O-methyladenosine
  modified_base 7: mod_base = um
  modified_base 8: mod_base = cm
  modified_base 9: mod_base = OTHER; note = 2'-fluoroadenosine
  modified_base 10: mod_base = OTHER; note = 2'-fluoroguanosine
  modified_base 11: mod_base = OTHER; note = 2'-fluoroguanosine
  modified_base 12: mod_base = OTHER; note = 2'-O-methyladenosine
  modified_base 13: mod_base = um
  modified_base 14: mod_base = gm
  modified_base 15: mod_base = um
  modified_base 16: mod_base = OTHER; note = 2'-O-methyladenosine
  modified_base 17: mod_base = OTHER; note = 2'-O-methyladenosine
  modified_base 18: mod_base = OTHER; note = 2'-O-methyladenosine
  modified_base 19: mod_base = cm
  modified_base 20: mod_base = um
  modified_base 21: mod_base = um
  source 1..21: mol_type = other RNA
gcataatcaggatgtaaactt

SEQ ID NO: 300 - RNA, 21 nt, synthetic construct
  modified_base 1: mod_base = cm
  modified_base 2: mod_base = OTHER; note = 2'-O-methyl-2-aminoadenosine
  modified_base 3: mod_base = um
  modified_base 4: mod_base = OTHER; note = 2'-O-methyladenosine
  modified_base 5: mod_base = OTHER; note = 2'-O-methyladenosine
  modified_base 6: mod_base = um
  modified_base 7: mod_base = cm
  modified_base 8: mod_base = OTHER; note = 2'-O-methyladenosine
  modified_base 9: mod_base = OTHER; note = 2'-fluoroguanosine
  modified_base 10: mod_base = OTHER; note = 2'-fluoroguanosine
  modified_base 11: mod_base = OTHER; note = 2'-fluoroadenosine
  modified_base 12: mod_base = um
  modified_base 13: mod_base = gm
  modified_base 14: mod_base = um
  modified_base 15: mod_base = OTHER; note = 2'-O-methyladenosine
  modified_base 16: mod_base = OTHER; note = 2'-O-methyladenosine
  modified_base 17: mod_base = OTHER; note = 2'-O-methyladenosine
  modified_base 18: mod_base = cm
  modified_base 19: mod_base = um
  modified_base 20: mod_base = um
  modified_base 21: mod_base = OTHER; note = 2'-O-methyladenosine
  source 1..21: mol_type = other RNA
cntaatcaggatgtaaactta

SEQ ID NO: 301 - RNA, 21 nt, synthetic construct
  modified_base 1: mod_base = gm
  modified_base 2: mod_base = gm
  modified_base 3: mod_base = OTHER; note = 2'-O-methyladenosine
  modified_base 4: mod_base = um
  modified_base 5: mod_base = gm
  modified_base 6: mod_base = um
  modified_base 7: mod_base = OTHER; note = 2'-O-methyladenosine
  modified_base 8: mod_base = OTHER; note = 2'-O-methyladenosine
  modified_base 9: mod_base = OTHER; note = 2'-fluoroadenosine
  modified_base 10: mod_base = OTHER; note = 2'-fluorocytidine
  modified_base 11: mod_base = OTHER; note = 2'-fluorouridine
  modified_base 12: mod_base = um
  modified_base 13: mod_base = OTHER; note = 2'-O-methyladenosine
  modified_base 14: mod_base = cm
  modified_base 15: mod_base = OTHER; note = 2'-O-methyladenosine
  modified_base 16: mod_base = um
  modified_base 17: mod_base = OTHER; note = 2'-O-methyladenosine
  modified_base 18: mod_base = gm
  modified_base 19: mod_base = cm
  modified_base 20: mod_base = um
  modified_base 21: mod_base = OTHER; note = 2'-O-methyladenosine
  source 1..21: mol_type = other RNA
ggatgtaaacttacatagcta

SEQ ID NO: 302 - RNA, 21 nt, synthetic construct
  modified_base 1: mod_base = gm
  modified_base 2: mod_base = gm
  modified_base 3: mod_base = um
  modified_base 4: mod_base = OTHER; note = 2'-O-methyladenosine
  modified_base 5: mod_base = OTHER; note = 2'-O-methyladenosine
  modified_base 6: mod_base = gm
  modified_base 7: mod_base = gm
  modified_base 8: mod_base = cm
  modified_base 9: mod_base = OTHER; note = 2'-fluorouridine
  modified_base 10: mod_base = OTHER; note = 2'-fluoroadenosine
  modified_base 11: mod_base = OTHER; note = 2'-fluoroguanosine
  modified_base 12: mod_base = OTHER; note = 2'-O-methyladenosine
  modified_base 13: mod_base = cm
  modified_base 14: mod_base = um
  modified_base 15: mod_base = um
  modified_base 16: mod_base = um
  modified_base 17: mod_base = OTHER; note = 2'-O-methyladenosine
  modified_base 18: mod_base = um
  modified_base 19: mod_base = um
  modified_base 20: mod_base = OTHER; note = 2'-O-methyl-2-aminoadenosine
  modified_base 21: mod_base = um
  source 1..21: mol_type = other RNA
ggtaaggctagactttattnt

SEQ ID NO: 303 - RNA, 21 nt, synthetic construct
  modified_base 1: mod_base = um
  modified_base 2: mod_base = gm
  modified_base 3: mod_base = gm
  modified_base 4: mod_base = um
  modified_base 5: mod_base = gm
  modified_base 6: mod_base = um
  modified_base 7: mod_base = cm
  modified_base 8: mod_base = um
  modified_base 9: mod_base = OTHER; note = 2'-fluorocytidine
  modified_base 10: mod_base = OTHER; note = 2'-fluorouridine
  modified_base 11: mod_base = OTHER; note = 2'-fluoroadenosine
  modified_base 12: mod_base = um
  modified_base 13: mod_base = cm
  modified_base 14: mod_base = um
  modified_base 15: mod_base = gm
  modified_base 16: mod_base = um
  modified_base 17: mod_base = OTHER; note = 2'-O-methyladenosine
  modified_base 18: mod_base = gm
  modified_base 19: mod_base = um
  modified_base 20: mod_base = OTHER; note = 2'-O-methyladenosine
  modified_base 21: mod_base = OTHER; note = 2'-O-methyladenosine
  source 1..21: mol_type = other RNA
tggtgtctctatctgtagtaa

SEQ ID NO: 304 - RNA, 21 nt, synthetic construct
  modified_base 1: mod_base = gm
  modified_base 2: mod_base = um
  modified_base 3: mod_base = cm
  modified_base 4: mod_base = um
  modified_base 5: mod_base = cm
  modified_base 6: mod_base = um
  modified_base 7: mod_base = OTHER; note = 2'-O-methyladenosine
  modified_base 8: mod_base = um
  modified_base 9: mod_base = OTHER; note = 2'-fluorocytidine
  modified_base 10: mod_base = OTHER; note = 2'-fluorouridine
  modified_base 11: mod_base = OTHER; note = 2'-fluoroguanosine
  modified_base 12: mod_base = um
  modified_base 13: mod_base = OTHER; note = 2'-O-methyladenosine
  modified_base 14: mod_base = gm
  modified_base 15: mod_base = um
  modified_base 16: mod_base = OTHER; note = 2'-O-methyladenosine
  modified_base 17: mod_base = cm
  modified_base 18: mod_base = um
  modified_base 19: mod_base = OTHER; note = 2'-O-methyladenosine
  modified_base 20: mod_base = um
  modified_base 21: mod_base = OTHER; note = 2'-O-methyladenosine
  source 1..21: mol_type = other RNA
gtctctatctgtagtactata

SEQ ID NO: 305 - RNA, 21 nt, synthetic construct
  modified_base 1: mod_base = gm
  modified_base 2: mod_base = cm
  modified_base 3: mod_base = um
  modified_base 4: mod_base = cm
  modified_base 5: mod_base = um
  modified_base 6: mod_base = OTHER; note = 2'-O-methyladenosine
  modified_base 7: mod_base = um
  modified_base 8: mod_base = cm
  modified_base 9: mod_base = OTHER; note = 2'-fluorouridine
  modified_base 10: mod_base = OTHER; note = 2'-fluoroguanosine
  modified_base 11: mod_base = OTHER; note = 2'-fluorouridine
  modified_base 12: mod_base = OTHER; note = 2'-O-methyladenosine
  modified_base 13: mod_base = gm
  modified_base 14: mod_base = um
  modified_base 15: mod_base = OTHER; note = 2'-O-methyladenosine
  modified_base 16: mod_base = cm
  modified_base 17: mod_base = um
  modified_base 18: mod_base = OTHER; note = 2'-O-methyladenosine
  modified_base 19: mod_base = um
  modified_base 20: mod_base = gm
  modified_base 21: mod_base = OTHER; note = 2'-O-methyladenosine
  source 1..21: mol_type = other RNA
gctctatctgtagtactatga

SEQ ID NO: 306 - RNA, 21 nt, synthetic construct
  modified_base 1: mod_base = gm
  modified_base 2: mod_base = cm
  modified_base 3: mod_base = um
  modified_base 4: mod_base = OTHER; note = 2'-O-methyladenosine
  modified_base 5: mod_base = um
  modified_base 6: mod_base = cm
  modified_base 7: mod_base = um
  modified_base 8: mod_base = gm
  modified_base 9: mod_base = OTHER; note = 2'-fluorouridine
  modified_base 10: mod_base = OTHER; note = 2'-fluoroadenosine
  modified_base 11: mod_base = OTHER; note = 2'-fluoroguanosine
  modified_base 12: mod_base = um
  modified_base 13: mod_base = OTHER; note = 2'-O-methyladenosine
  modified_base 14: mod_base = cm
  modified_base 15: mod_base = um
  modified_base 16: mod_base = OTHER; note = 2'-O-methyladenosine
  modified_base 17: mod_base = um
  modified_base 18: mod_base = gm
  modified_base 19: mod_base = OTHER; note = 2'-O-methyladenosine
  modified_base 20: mod_base = cm
  modified_base 21: mod_base = OTHER; note = 2'-O-methyladenosine
  source 1..21: mol_type = other RNA
gctatctgtagtactatgaca

SEQ ID NO: 307 - RNA, 21 nt, synthetic construct
  modified_base 1: mod_base = gm
  modified_base 2: mod_base = um
  modified_base 3: mod_base = cm
  modified_base 4: mod_base = um
  modified_base 5: mod_base = OTHER; note = 2'-O-methyladenosine
  modified_base 6: mod_base = gm
  modified_base 7: mod_base = cm
  modified_base 8: mod_base = OTHER; note = 2'-O-methyladenosine
  modified_base 9: mod_base = OTHER; note = 2'-fluoroadenosine
  modified_base 10: mod_base = OTHER; note = 2'-fluorouridine
  modified_base 11: mod_base = OTHER; note = 2'-fluoroguanosine
  modified_base 12: mod_base = um
  modified_base 13: mod_base = um
  modified_base 14: mod_base = gm
  modified_base 15: mod_base = cm
  modified_base 16: mod_base = OTHER; note = 2'-O-methyladenosine
  modified_base 17: mod_base = OTHER; note = 2'-O-methyladenosine
  modified_base 18: mod_base = OTHER; note = 2'-O-methyl-2-aminoadenosine
  modified_base 19: mod_base = um
  modified_base 20: mod_base = um
  modified_base 21: mod_base = OTHER; note = 2'-O-methyladenosine
  source 1..21: mol_type = other RNA
gtctagcaatgttgcaantta

SEQ ID NO: 308 - RNA, 21 nt, synthetic construct
  modified_base 1: mod_base = gm
  modified_base 2: mod_base = OTHER; note = 2'-O-methyl-2-aminoadenosine
  modified_base 3: mod_base = OTHER; note = 2'-O-methyladenosine
  modified_base 4: mod_base = gm
  modified_base 5: mod_base = OTHER; note = 2'-O-methyladenosine
  modified_base 6: mod_base = cm
  modified_base 7: mod_base = um
  modified_base 8: mod_base = cm
  modified_base 9: mod_base = OTHER; note = 2'-fluoroadenosine
  modified_base 10: mod_base = OTHER; note = 2'-fluorouridine
  modified_base 11: mod_base = OTHER; note = 2'-fluorocytidine
  modified_base 12: mod_base = um
  modified_base 13: mod_base = cm
  modified_base 14: mod_base = um
  modified_base 15: mod_base = OTHER; note = 2'-O-methyladenosine
  modified_base 16: mod_base = um
  modified_base 17: mod_base = gm
  modified_base 18: mod_base = OTHER; note = 2'-O-methyladenosine
  modified_base 19: mod_base = um
  modified_base 20: mod_base = gm
  modified_base 21: mod_base = OTHER; note = 2'-O-methyladenosine
  source 1..21: mol_type = other RNA
gnagactcatctctatgatga

SEQ ID NO: 309 - RNA, 21 nt, synthetic construct
  modified_base 1: mod_base = gm
  modified_base 2: mod_base = um
  modified_base 3: mod_base = gm
  modified_base 4: mod_base = gm
  modified_base 5: mod_base = OTHER; note = 2'-O-methyladenosine
  modified_base 6: mod_base = gm
  modified_base 7: mod_base = um
  modified_base 8: mod_base = cm
  modified_base 9: mod_base = OTHER; note = 2'-fluoroadenosine
  modified_base 10: mod_base = OTHER; note = 2'-fluorocytidine
  modified_base 11: mod_base = OTHER; note = 2'-fluoroadenosine
  modified_base 12: mod_base = um
  modified_base 13: mod_base = um
  modified_base 14: mod_base = OTHER; note = 2'-O-methyladenosine
  modified_base 15: mod_base = OTHER; note = 2'-O-methyladenosine
  modified_base 16: mod_base = um
  modified_base 17: mod_base = um
  modified_base 18: mod_base = gm
  modified_base 19: mod_base = gm
  modified_base 20: mod_base = OTHER; note = 2'-O-methyladenosine
  modified_base 21: mod_base = OTHER; note = 2'-O-methyladenosine
  source 1..21: mol_type = other RNA
gtggagtcacattaattggaa

SEQ ID NO: 310 - RNA, 21 nt, synthetic construct
  modified_base 1: mod_base = gm
  modified_base 2: mod_base = gm
  modified_base 3: mod_base = OTHER; note = 2'-O-methyladenosine
  modified_base 4: mod_base = um
  modified_base 5: mod_base = gm
  modified_base 6: mod_base = OTHER; note = 2'-O-methyladenosine
  modified_base 7: mod_base = gm
  modified_base 8: mod_base = um
  modified_base 9: mod_base = OTHER; note = 2'-fluoroadenosine
  modified_base 10: mod_base = OTHER; note = 2'-fluorocytidine
  modified_base 11: mod_base = OTHER; note = 2'-fluoroguanosine
  modified_base 12: mod_base = OTHER; note = 2'-O-methyladenosine
  modified_base 13: mod_base = OTHER; note = 2'-O-methyladenosine
  modified_base 14: mod_base = cm
  modified_base 15: mod_base = um
  modified_base 16: mod_base = um
  modified_base 17: mod_base = OTHER; note = 2'-O-methyladenosine
  modified_base 18: mod_base = um
  modified_base 19: mod_base = gm
  modified_base 20: mod_base = um
  modified_base 21: mod_base = OTHER; note = 2'-O-methyladenosine
  source 1..21: mol_type = other RNA
ggatgagtacgaacttatgta

SEQ ID NO: 311 - RNA, 21 nt, synthetic construct
  modified_base 1: mod_base = OTHER; note = 2'-O-methyladenosine
  modified_base 2: mod_base = cm
  modified_base 3: mod_base = gm
  modified_base 4: mod_base = OTHER; note = 2'-O-methyladenosine
  modified_base 5: mod_base = OTHER; note = 2'-O-methyladenosine
  modified_base 6: mod_base = cm
  modified_base 7: mod_base = um
  modified_base 8: mod_base = um
  modified_base 9: mod_base = OTHER; note = 2'-fluoroadenosine
  modified_base 10: mod_base = OTHER; note = 2'-fluorouridine
  modified_base 11: mod_base = OTHER; note = 2'-fluoroguanosine
  modified_base 12: mod_base = um
  modified_base 13: mod_base = OTHER; note = 2'-O-methyladenosine
  modified_base 14: mod_base = cm
  modified_base 15: mod_base = um
  modified_base 16: mod_base = cm
  modified_base 17: mod_base = OTHER; note = 2'-O-methyladenosine
  modified_base 18: mod_base = um
  modified_base 19: mod_base = um
  modified_base 20: mod_base = cm
  modified_base 21: mod_base = OTHER; note = 2'-O-methyladenosine
  source 1..21: mol_type = other RNA
acgaacttatgtactcattca

SEQ ID NO: 312 - RNA, 21 nt, synthetic construct
  modified_base 1: mod_base = cm
  modified_base 2: mod_base = gm
  modified_base 3: mod_base = OTHER; note = 2'-O-methyladenosine
  modified_base 4: mod_base = OTHER; note = 2'-O-methyladenosine
  modified_base 5: mod_base = cm
  modified_base 6: mod_base = um
  modified_base 7: mod_base = um
  modified_base 8: mod_base = OTHER; note = 2'-O-methyladenosine
  modified_base 9: mod_base = OTHER; note = 2'-fluorouridine
  modified_base 10: mod_base = OTHER; note = 2'-fluoroguanosine
  modified_base 11: mod_base = OTHER; note = 2'-fluorouridine
  modified_base 12: mod_base = OTHER; note = 2'-O-methyladenosine
  modified_base 13: mod_base = cm
  modified_base 14: mod_base = um
  modified_base 15: mod_base = cm
  modified_base 16: mod_base = OTHER; note = 2'-O-methyladenosine
  modified_base 17: mod_base = um
  modified_base 18: mod_base = um
  modified_base 19: mod_base = cm
  modified_base 20: mod_base = gm
  modified_base 21: mod_base = um
  source 1..21: mol_type = other RNA
cgaacttatgtactcattcgt

SEQ ID NO: 313 - RNA, 21 nt, synthetic construct
  modified_base 1: mod_base = cm
  modified_base 2: mod_base = um
  modified_base 3: mod_base = um
  modified_base 4: mod_base = OTHER; note = 2'-O-methyladenosine
  modified_base 5: mod_base = um
  modified_base 6: mod_base = gm
  modified_base 7: mod_base = um
  modified_base 8: mod_base = OTHER; note = 2'-O-methyladenosine
  modified_base 9: mod_base = OTHER; note = 2'-fluorocytidine
  modified_base 10: mod_base = OTHER; note = 2'-fluorouridine
  modified_base 11: mod_base = OTHER; note = 2'-fluorocytidine
  modified_base 12: mod_base = OTHER; note = 2'-O-methyladenosine
  modified_base 13: mod_base = um
  modified_base 14: mod_base = um
  modified_base 15: mod_base = cm
  modified_base 16: mod_base = gm
  modified_base 17: mod_base = um
  modified_base 18: mod_base = um
  modified_base 19: mod_base = um
  modified_base 20: mod_base = cm
  modified_base 21: mod_base = OTHER; note = 2'-O-methyladenosine
  source 1..21: mol_type = other RNA
cttatgtactcattcgtttca

SEQ ID NO: 314 - RNA, 21 nt, synthetic construct
  modified_base 1: mod_base = cm
  modified_base 2: mod_base = um
  modified_base 3: mod_base = um
  modified_base 4: mod_base = OTHER; note = 2'-O-methyladenosine
  modified_base 5: mod_base = um
  modified_base 6: mod_base = gm
  modified_base 7: mod_base = um
  modified_base 8: mod_base = OTHER; note = 2'-O-methyladenosine
  modified_base 9: mod_base = OTHER; note = 2'-fluorocytidine
  modified_base 10: mod_base = OTHER; note = 2'-fluorouridine
  modified_base 11: mod_base = OTHER; note = 2'-fluorocytidine
  modified_base 12: mod_base = OTHER; note = 2'-O-methyladenosine
  modified_base 13: mod_base = um
  modified_base 14: mod_base = um
  modified_base 15: mod_base = cm
  modified_base 16: mod_base = OTHER; note = 2'-O-methylinosine
  modified_base 17: mod_base = um
  modified_base 18: mod_base = um
  modified_base 19: mod_base = um
  modified_base 20: mod_base = cm
  modified_base 21: mod_base = OTHER; note = 2'-O-methyladenosine
  source 1..21: mol_type = other RNA
cttatgtactcattcntttca

SEQ ID NO: 315 - RNA, 21 nt, synthetic construct
  modified_base 1: mod_base = gm
  modified_base 2: mod_base = um
  modified_base 3: mod_base = OTHER; note = 2'-O-methyladenosine
  modified_base 4: mod_base = gm
  modified_base 5: mod_base = um
  modified_base 6: mod_base = um
  modified_base 7: mod_base = OTHER; note = 2'-O-methyladenosine
  modified_base 8: mod_base = OTHER; note = 2'-O-methyladenosine
  modified_base 9: mod_base = OTHER; note = 2'-fluorouridine
  modified_base 10: mod_base = OTHER; note = 2'-fluoroadenosine
  modified_base 11: mod_base = OTHER; note = 2'-fluoroguanosine
  modified_base 12: mod_base = cm
  modified_base 13: mod_base = gm
  modified_base 14: mod_base = um
  modified_base 15: mod_base = OTHER; note = 2'-O-methyladenosine
  modified_base 16: mod_base = cm
  modified_base 17: mod_base = um
  modified_base 18: mod_base = um
  modified_base 19: mod_base = cm
  modified_base 20: mod_base = um
  modified_base 21: mod_base = um
  source 1..21: mol_type = other RNA
gtagttaatagcgtacttctt

SEQ ID NO: 316 - RNA, 21 nt, synthetic construct
  modified_base 1: mod_base = gm
  modified_base 2: mod_base = cm
  modified_base 3: mod_base = um
  modified_base 4: mod_base = um
  modified_base 5: mod_base = gm
  modified_base 6: mod_base = cm
  modified_base 7: mod_base = um
  modified_base 8: mod_base = um
  modified_base 9: mod_base = OTHER; note = 2'-fluorouridine
  modified_base 10: mod_base = OTHER; note = 2'-fluorocytidine
  modified_base 11: mod_base = OTHER; note = 2'-fluoroguanosine
  modified_base 12: mod_base = um
  modified_base 13: mod_base = gm
  modified_base 14: mod_base = gm
  modified_base 15: mod_base = um
  modified_base 16: mod_base = OTHER; note = 2'-O-methyladenosine
  modified_base 17: mod_base = um
  modified_base 18: mod_base = um
  modified_base 19: mod_base = cm
  modified_base 20: mod_base = um
  modified_base 21: mod_base = um
  source 1..21: mol_type = other RNA
gcttgctttcgtggtattctt

SEQ ID NO: 317 - RNA, 21 nt, synthetic construct
  modified_base 1: mod_base = gm
  modified_base 2: mod_base = um
  modified_base 3: mod_base = OTHER; note = 2'-O-methyladenosine
  modified_base 4: mod_base = cm
  modified_base 5: mod_base = OTHER; note = 2'-O-methyladenosine
  modified_base 6: mod_base = cm
  modified_base 7: mod_base = um
  modified_base 8: mod_base = OTHER; note = 2'-O-methyladenosine
  modified_base 9: mod_base = OTHER; note = 2'-fluoroguanosine
  modified_base 10: mod_base = OTHER; note = 2'-fluorocytidine
  modified_base 11: mod_base = OTHER; note = 2'-fluorocytidine
  modified_base 12: mod_base = OTHER; note = 2'-O-methyladenosine
  modified_base 13: mod_base = um
  modified_base 14: mod_base = cm
  modified_base 15: mod_base = cm
  modified_base 16: mod_base = um
  modified_base 17: mod_base = um
  modified_base 18: mod_base = OTHER; note = 2'-O-methyladenosine
  modified_base 19: mod_base = cm
  modified_base 20: mod_base = um
  modified_base 21: mod_base = OTHER; note = 2'-O-methyladenosine
  source 1..21: mol_type = other RNA
gtacactagccatccttacta

SEQ ID NO: 318 - RNA, 21 nt, synthetic construct
  modified_base 1: mod_base = gm
  modified_base 2: mod_base = um
  modified_base 3: mod_base = OTHER; note = 2'-O-methyladenosine
  modified_base 4: mod_base = cm
  modified_base 5: mod_base = um
  modified_base 6: mod_base = gm
  modified_base 7: mod_base = cm
  modified_base 8: mod_base = um
  modified_base 9: mod_base = OTHER; note = 2'-fluoroguanosine
  modified_base 10: mod_base = OTHER; note = 2'-fluorocytidine
  modified_base 11: mod_base = OTHER; note = 2'-fluoroadenosine
  modified_base 12: mod_base = OTHER; note = 2'-O-methyladenosine
  modified_base 13: mod_base = um
  modified_base 14: mod_base = OTHER; note = 2'-O-methyladenosine
  modified_base 15: mod_base = um
  modified_base 16: mod_base = um
  modified_base 17: mod_base = gm
  modified_base 18: mod_base = um
  modified_base 19: mod_base = um
  modified_base 20: mod_base = OTHER; note = 2'-O-methyladenosine
  modified_base 21: mod_base = OTHER; note = 2'-O-methyladenosine
  source 1..21: mol_type = other RNA
gtactgctgcaatattgttaa

SEQ ID NO: 319 - RNA, 21 nt, synthetic construct
  modified_base 1: mod_base = cm
  modified_base 2: mod_base = um
  modified_base 3: mod_base = gm
  modified_base 4: mod_base = cm
  modified_base 5: mod_base = um
  modified_base 6: mod_base = gm
  modified_base 7: mod_base = cm
  modified_base 8: mod_base = OTHER; note = 2'-O-methyladenosine
  modified_base 9: mod_base = OTHER; note = 2'-fluoroadenosine
  modified_base 10: mod_base = OTHER; note = 2'-fluorouridine
  modified_base 11: mod_base = OTHER; note = 2'-fluoroadenosine
  modified_base 12: mod_base = um
  modified_base 13: mod_base = um
  modified_base 14: mod_base = gm
  modified_base 15: mod_base = um
  modified_base 16: mod_base = um
  modified_base 17: mod_base = OTHER; note = 2'-O-methyladenosine
  modified_base 18: mod_base = OTHER; note = 2'-O-methyladenosine
  modified_base 19: mod_base = cm
  modified_base 20: mod_base = gm
  modified_base 21: mod_base = um
  source 1..21: mol_type = other RNA
ctgctgcaatattgttaacgt

SEQ ID NO: 320 - RNA, 21 nt, synthetic construct
  modified_base 1: mod_base = um
  modified_base 2: mod_base = gm
  modified_base 3: mod_base = cm
  modified_base 4: mod_base = um
  modified_base 5: mod_base = gm
  modified_base 6: mod_base = cm
  modified_base 7: mod_base = OTHER; note = 2'-O-methyladenosine
  modified_base 8: mod_base = OTHER; note = 2'-O-methyladenosine
  modified_base 9: mod_base = OTHER; note = 2'-fluorouridine
  modified_base 10: mod_base = OTHER; note = 2'-fluoroadenosine
  modified_base 11: mod_base = OTHER; note = 2'-fluorouridine
  modified_base 12: mod_base = um
  modified_base 13: mod_base = gm
  modified_base 14: mod_base = um
  modified_base 15: mod_base = um
  modified_base 16: mod_base = OTHER; note = 2'-O-methyladenosine
  modified_base 17: mod_base = OTHER; note = 2'-O-methyladenosine
  modified_base 18: mod_base = cm
  modified_base 19: mod_base = gm
  modified_base 20: mod_base = um
  modified_base 21: mod_base = OTHER; note = 2'-O-methyladenosine
  source 1..21: mol_type = other RNA
tgctgcaatattgttaacgta

SEQ ID NO: 321 - RNA, 21 nt, synthetic construct
  modified_base 1: mod_base = um
  modified_base 2: mod_base = gm
  modified_base 3: mod_base = cm
  modified_base 4: mod_base = um
  modified_base 5: mod_base = gm
  modified_base 6: mod_base = cm
  modified_base 7: mod_base = OTHER; note = 2'-O-methyladenosine
  modified_base 8: mod_base = OTHER; note = 2'-O-methyladenosine
  modified_base 9: mod_base = OTHER; note = 2'-fluorouridine
  modified_base 10: mod_base = OTHER; note = 2'-O-methyl-2-aminoadenosine
  modified_base 11: mod_base = OTHER; note = 2'-fluorouridine
  modified_base 12: mod_base = um
  modified_base 13: mod_base = gm
  modified_base 14: mod_base = um
  modified_base 15: mod_base = um
  modified_base 16: mod_base = OTHER; note = 2'-O-methyladenosine
  modified_base 17: mod_base = OTHER; note = 2'-O-methyladenosine
  modified_base 18: mod_base = cm
  modified_base 19: mod_base = gm
  modified_base 20: mod_base = um
  modified_base 21: mod_base = OTHER; note = 2'-O-methyladenosine
  source 1..21: mol_type = other RNA
tgctgcaatnttgttaacgta

SEQ ID NO: 322 - RNA, 21 nt, synthetic construct
  modified_base 1: mod_base = cm
  modified_base 2: mod_base = cm
  modified_base 3: mod_base = um
  modified_base 4: mod_base = gm
  modified_base 5: mod_base = OTHER; note = 2'-O-methyladenosine
  modified_base 6: mod_base = um
  modified_base 7: mod_base = cm
  modified_base 8: mod_base = um
  modified_base 9: mod_base = OTHER; note = 2'-fluorouridine
  modified_base 10: mod_base = OTHER; note = 2'-fluorocytidine
  modified_base 11: mod_base = OTHER; note = 2'-fluorouridine
  modified_base 12: mod_base = gm
  modified_base 13: mod_base = gm
  modified_base 14: mod_base = um
  modified_base 15: mod_base = cm
  modified_base 16: mod_base = um
  modified_base 17: mod_base = OTHER; note = 2'-O-methyladenosine
  modified_base 18: mod_base = OTHER; note = 2'-O-methyladenosine
  modified_base 19: mod_base = OTHER; note = 2'-O-methyladenosine
  modified_base 20: mod_base = cm
  modified_base 21: mod_base = OTHER; note = 2'-O-methyladenosine
  source 1..21: mol_type = other RNA
cctgatcttctggtctaaaca

SEQ ID NO: 323 - RNA, 21 nt, synthetic construct
  modified_base 1: mod_base = cm
  modified_base 2: mod_base = OTHER; note = 2'-O-methyladenosine
  modified_base 3: mod_base = um
  modified_base 4: mod_base = cm
  modified_base 5: mod_base = OTHER; note = 2'-O-methyladenosine
  modified_base 6: mod_base = cm
  modified_base 7: mod_base = gm
  modified_base 8: mod_base = OTHER; note = 2'-O-methyladenosine
  modified_base 9: mod_base = OTHER; note = 2'-fluoroadenosine
  modified_base 10: mod_base = OTHER; note = 2'-fluorocytidine
  modified_base 11: mod_base = OTHER; note = 2'-fluoroguanosine
  modified_base 12: mod_base = cm
  modified_base 13: mod_base = um
  modified_base 14: mod_base = um
  modified_base 15: mod_base = um
  modified_base 16: mod_base = cm
  modified_base 17: mod_base = um
  modified_base 18: mod_base = um
  modified_base 19: mod_base = OTHER; note = 2'-O-methyladenosine
  modified_base 20: mod_base = um
  modified_base 21: mod_base = um
  source 1..21: mol_type = other RNA
catcacgaacgctttcttatt

SEQ ID NO: 324 - RNA, 21 nt, synthetic construct
  modified_base 1: mod_base = cm
  modified_base 2: mod_base = OTHER; note = 2'-O-methyladenosine
  modified_base 3: mod_base = um
  modified_base 4: mod_base = cm
  modified_base 5: mod_base = OTHER; note = 2'-O-methyladenosine
  modified_base 6: mod_base = cm
  modified_base 7: mod_base = gm
  modified_base 8: mod_base = OTHER; note = 2'-O-methyladenosine
  modified_base 9: mod_base = OTHER; note = 2'-fluoroadenosine
  modified_base 10: mod_base = OTHER; note = 2'-fluorocytidine
  modified_base 11: mod_base = OTHER; note = 2'-fluoroguanosine
  modified_base 12: mod_base = cm
  modified_base 13: mod_base = um
  modified_base 14: mod_base = um
  modified_base 15: mod_base = um
  modified_base 16: mod_base = cm
  modified_base 17: mod_base = um
  modified_base 18: mod_base = um
  modified_base 19: mod_base = OTHER; note = 2'-O-methyl-2-aminoadenosine
  modified_base 20: mod_base = um
  modified_base 21: mod_base = um
  source 1..21: mol_type = other RNA
catcacgaacgctttcttntt

SEQ ID NO: 325 - RNA, 21 nt, synthetic construct
  modified_base 1: mod_base = cm
  modified_base 2: mod_base = gm
  modified_base 3: mod_base = OTHER; note = 2'-O-methyladenosine
  modified_base 4: mod_base = OTHER; note = 2'-O-methyladenosine
  modified_base 5: mod_base = cm
  modified_base 6: mod_base = gm
  modified_base 7: mod_base = cm
  modified_base 8: mod_base = um
  modified_base 9: mod_base = OTHER; note = 2'-fluorouridine
  modified_base 10: mod_base = OTHER; note = 2'-fluorouridine
  modified_base 11: mod_base = OTHER; note = 2'-fluorocytidine
  modified_base 12: mod_base = um
  modified_base 13: mod_base = um
  modified_base 14: mod_base = OTHER; note = 2'-O-methyladenosine
  modified_base 15: mod_base = um
  modified_base 16: mod_base = um
  modified_base 17: mod_base = OTHER; note = 2'-O-methyladenosine
  modified_base 18: mod_base = cm
  modified_base 19: mod_base = OTHER; note = 2'-O-methyladenosine
  modified_base 20: mod_base = OTHER; note = 2'-O-methyladenosine
  modified_base 21: mod_base = OTHER; note = 2'-O-methyladenosine
  source 1..21: mol_type = other RNA
cgaacgctttcttattacaaa

SEQ ID NO: 326 - RNA, 21 nt, synthetic construct
  modified_base 1: mod_base = gm
  modified_base 2: mod_base = OTHER; note = 2'-O-methyladenosine
  modified_base 3: mod_base = cm
  modified_base 4: mod_base = OTHER; note = 2'-O-methyladenosine
  modified_base 5: mod_base = gm
  modified_base 6: mod_base = um
  modified_base 7: mod_base = OTHER; note = 2'-O-methyladenosine
  modified_base 8: mod_base = OTHER; note = 2'-O-methyladenosine
  modified_base 9: mod_base = OTHER; note = 2'-fluoroguanosine
  modified_base 10: mod_base = OTHER; note = 2'-fluorouridine
  modified_base 11: mod_base = OTHER; note = 2'-fluoroguanosine
  modified_base 12: mod_base = OTHER; note = 2'-O-methyladenosine
  modified_base 13: mod_base = cm
  modified_base 14: mod_base = OTHER; note = 2'-O-methyladenosine
  modified_base 15: mod_base = OTHER; note = 2'-O-methyladenosine
  modified_base 16: mod_base = cm
  modified_base 17: mod_base = OTHER; note = 2'-O-methyladenosine
  modified_base 18: mod_base = gm
  modified_base 19: mod_base = OTHER; note = 2'-O-methyladenosine
  modified_base 20: mod_base = um
  modified_base 21: mod_base = OTHER; note = 2'-O-methyladenosine
  source 1..21: mol_type = other RNA
gacagtaagtgacaacagata

SEQ ID NO: 327 - RNA, 21 nt, synthetic construct
  modified_base 1: mod_base = cm
  modified_base 2: mod_base = OTHER; note = 2'-O-methyladenosine
  modified_base 3: mod_base = gm
  modified_base 4: mod_base = um
  modified_base 5: mod_base = OTHER; note = 2'-O-methyladenosine
  modified_base 6: mod_base = OTHER; note = 2'-O-methyladenosine
  modified_base 7: mod_base = gm
  modified_base 8: mod_base = um
  modified_base 9: mod_base = OTHER; note = 2'-fluoroguanosine
  modified_base 10: mod_base = OTHER; note = 2'-fluoroadenosine
  modified_base 11: mod_base = OTHER; note = 2'-fluorocytidine
  modified_base 12: mod_base = OTHER; note = 2'-O-methyladenosine
  modified_base 13: mod_base = OTHER; note = 2'-O-methyladenosine
  modified_base 14: mod_base = cm
  modified_base 15: mod_base = OTHER; note = 2'-O-methyladenosine
  modified_base 16: mod_base = gm
  modified_base 17: mod_base = OTHER; note = 2'-O-methyladenosine
  modified_base 18: mod_base = um
  modified_base 19: mod_base = gm
  modified_base 20: mod_base = um
  modified_base 21: mod_base = um
  source 1..21: mol_type = other RNA
cagtaagtgacaacagatgtt

SEQ ID NO: 328 - RNA, 21 nt, synthetic construct
  modified_base 1: mod_base = cm
  modified_base 2: mod_base = OTHER; note = 2'-O-methyl-2-aminoadenosine
  modified_base 3: mod_base = OTHER; note = 2'-O-methyladenosine
  modified_base 4: mod_base = OTHER; note = 2'-O-methyladenosine
  modified_base 5: mod_base = um
  modified_base 6: mod_base = um
  modified_base 7: mod_base = gm
  modified_base 8: mod_base = gm
  modified_base 9: mod_base = OTHER; note = 2'-fluoroadenosine
  modified_base 10: mod_base = OTHER; note = 2'-fluorouridine
  modified_base 11: mod_base = OTHER; note = 2'-fluoroguanosine
  modified_base 12: mod_base = OTHER; note = 2'-O-methyladenosine
  modified_base 13: mod_base = cm
  modified_base 14: mod_base = OTHER; note = 2'-O-methyladenosine
  modified_base 15: mod_base = OTHER; note = 2'-O-methyladenosine
  modified_base 16: mod_base = OTHER; note = 2'-O-methyladenosine
  modified_base 17: mod_base = gm
  modified_base 18: mod_base = OTHER; note = 2'-O-methyladenosine
  modified_base 19: mod_base = um
  modified_base 20: mod_base = cm
  modified_base 21: mod_base = OTHER; note = 2'-O-methyladenosine
  source 1..21: mol_type = other RNA
cnaattggatgacaaagatca

SEQ ID NO: 329 - RNA, 21 nt, synthetic construct
  modified_base 1: mod_base = cm
  modified_base 2: mod_base = um
  modified_base 3: mod_base = cm
  modified_base 4: mod_base = OTHER; note = 2'-O-methyladenosine
  modified_base 5: mod_base = cm
  modified_base 6: mod_base = OTHER; note = 2'-O-methyladenosine
  modified_base 7: mod_base = um
  modified_base 8: mod_base = OTHER; note = 2'-O-methyladenosine
  modified_base 9: mod_base = OTHER; note = 2'-fluoroguanosine
  modified_base 10: mod_base = OTHER; note = 2'-fluorocytidine
  modified_base 11: mod_base = OTHER; note = 2'-fluoroadenosine
  modified_base 12: mod_base = OTHER; note = 2'-O-methyladenosine
  modified_base 13: mod_base = um
  modified_base 14: mod_base = cm
  modified_base 15: mod_base = um
  modified_base 16: mod_base = um
  modified_base 17: mod_base = um
  modified_base 18: mod_base = OTHER; note = 2'-O-methyladenosine
  modified_base 19: mod_base = OTHER; note = 2'-O-methyl-2-aminoadenosine
  modified_base 20: mod_base = um
  modified_base 21: mod_base = OTHER; note = 2'-O-methyladenosine
  source 1..21: mol_type = other RNA
ctcacatagcaatctttanta

SEQ ID NO: 330 - RNA, 21 nt, synthetic construct
  modified_base 1: mod_base = cm
  modified_base 2: mod_base = cm
  modified_base 3: mod_base = um
  modified_base 4: mod_base = um
  modified_base 5: mod_base = um
  modified_base 6: mod_base = um
  modified_base 7: mod_base = gm
  modified_base 8: mod_base = OTHER; note = 2'-O-methyladenosine
  modified_base 9: mod_base = OTHER; note = 2'-fluorouridine
  modified_base 10: mod_base = OTHER; note = 2'-fluoroguanosine
  modified_base 11: mod_base = OTHER; note = 2'-fluorouridine
  modified_base 12: mod_base = um
  modified_base 13: mod_base = gm
  modified_base 14: mod_base = um
  modified_base 15: mod_base = um
  modified_base 16: mod_base = OTHER; note = 2'-O-methyladenosine
  modified_base 17: mod_base = gm
  modified_base 18: mod_base = OTHER; note = 2'-O-methyladenosine
  modified_base 19: mod_base = cm
  modified_base 20: mod_base = OTHER; note = 2'-O-methyladenosine
  modified_base 21: mod_base = OTHER; note = 2'-O-methyladenosine
  source 1..21: mol_type = other RNA
ccttttgatgttgttagacaa

SEQ ID NO: 331 - RNA, 21 nt, synthetic construct
  modified_base 1: mod_base = um
  modified_base 2: mod_base = gm
  modified_base 3: mod_base = gm
  modified_base 4: mod_base = um
  modified_base 5: mod_base = OTHER; note = 2'-O-methyladenosine
  modified_base 6: mod_base = OTHER; note = 2'-O-methyladenosine
  modified_base 7: mod_base = um
  modified_base 8: mod_base = gm
  modified_base 9: mod_base = OTHER; note = 2'-fluorocytidine
  modified_base 10: mod_base = OTHER; note = 2'-fluorouridine
  modified_base 11: mod_base = OTHER; note = 2'-fluorouridine
  modified_base 12: mod_base = um
  modified_base 13: mod_base = OTHER; note = 2'-O-methyladenosine
  modified_base 14: mod_base = gm
  modified_base 15: mod_base = OTHER; note = 2'-O-methyladenosine
  modified_base 16: mod_base = um
  modified_base 17: mod_base = cm
  modified_base 18: mod_base = OTHER; note = 2'-O-methyladenosine
  modified_base 19: mod_base = OTHER; note = 2'-O-methyladenosine
  modified_base 20: mod_base = gm
  modified_base 21: mod_base = OTHER; note = 2'-O-methyladenosine
  source 1..21: mol_type = other RNA
tggtaatgctttagatcaaga

SEQ ID NO: 332 - RNA, 21 nt, synthetic construct
  modified_base 1: mod_base = gm
  modified_base 2: mod_base = cm
  modified_base 3: mod_base = OTHER; note = 2'-O-methyladenosine
  modified_base 4: mod_base = um
  modified_base 5: mod_base = OTHER; note = 2'-O-methyladenosine
  modified_base 6: mod_base = cm
  modified_base 7: mod_base = OTHER; note = 2'-O-methyladenosine
  modified_base 8: mod_base = OTHER; note = 2'-O-methyladenosine
  modified_base 9: mod_base = OTHER; note = 2'-fluorouridine
  modified_base 10: mod_base = OTHER; note = 2'-fluoroguanosine
  modified_base 11: mod_base = OTHER; note = 2'-fluorocytidine
  modified_base 12: mod_base = um
  modified_base 13: mod_base = OTHER; note = 2'-O-methyladenosine
  modified_base 14: mod_base = gm
  modified_base 15: mod_base = um
  modified_base 16: mod_base = um
  modified_base 17: mod_base = OTHER; note = 2'-O-methyladenosine
  modified_base 18: mod_base = OTHER; note = 2'-O-methyladenosine
  modified_base 19: mod_base = OTHER; note = 2'-O-methyladenosine
  modified_base 20: mod_base = cm
  modified_base 21: mod_base = OTHER; note = 2'-O-methyladenosine
  source 1..21: mol_type = other RNA
gcatacaatgctagttaaaca

SEQ ID NO: 333 - RNA, 21 nt, synthetic construct
  modified_base 1: mod_base = cm
  modified_base 2: mod_base = OTHER; note = 2'-O-methyl-2-aminoadenosine
  modified_base 3: mod_base = um
  modified_base 4: mod_base = OTHER; note = 2'-O-methyladenosine
  modified_base 5: mod_base = cm
  modified_base 6: mod_base = OTHER; note = 2'-O-methyladenosine
  modified_base 7: mod_base = OTHER; note = 2'-O-methyladenosine
  modified_base 8: mod_base = um
  modified_base 9: mod_base = OTHER; note = 2'-fluoroguanosine
  modified_base 10: mod_base = OTHER; note = 2'-fluorocytidine
  modified_base 11: mod_base = OTHER; note = 2'-fluorouridine
  modified_base 12: mod_base = OTHER; note = 2'-O-methyladenosine
  modified_base 13: mod_base = gm
  modified_base 14: mod_base = um
  modified_base 15: mod_base = um
  modified_base 16: mod_base = OTHER; note = 2'-O-methyladenosine
  modified_base 17: mod_base = OTHER; note = 2'-O-methyladenosine
  modified_base 18: mod_base = OTHER; note = 2'-O-methyladenosine
  modified_base 19: mod_base = cm
  modified_base 20: mod_base = OTHER; note = 2'-O-methyladenosine
  modified_base 21: mod_base = OTHER; note = 2'-O-methyladenosine
  source 1..21: mol_type = other RNA
cntacaatgctagttaaacaa

SEQ ID NO: 334 - RNA, 21 nt, synthetic construct
  modified_base 1: mod_base = gm
  modified_base 2: mod_base = um
  modified_base 3: mod_base = gm
  modified_base 4: mod_base = cm
  modified_base 5: mod_base = OTHER; note = 2'-O-methyladenosine
  modified_base 6: mod_base = um
  modified_base 7: mod_base = OTHER; note = 2'-O-methyladenosine
  modified_base 8: mod_base = OTHER; note = 2'-O-methyladenosine
  modified_base 9: mod_base = OTHER; note = 2'-fluorouridine
  modified_base 10: mod_base = OTHER; note = 2'-fluoroguanosine
  modified_base 11: mod_base = OTHER; note = 2'-fluorouridine
  modified_base 12: mod_base = cm
  modified_base 13: mod_base = um
  modified_base 14: mod_base = gm
  modified_base 15: mod_base = OTHER; note = 2'-O-methyladenosine
  modified_base 16: mod_base = um
  modified_base 17: mod_base = OTHER; note = 2'-O-methyladenosine
  modified_base 18: mod_base = gm
  modified_base 19: mod_base = OTHER; note = 2'-O-methyladenosine
  modified_base 20: mod_base = gm
  modified_base 21: mod_base = OTHER; note = 2'-O-methyladenosine
  source 1..21: mol_type = other RNA
gtgcataatgtctgatagaga

SEQ ID NO: 335 - RNA, 21 nt, synthetic construct
  modified_base 1: mod_base = gm
  modified_base 2: mod_base = gm
  modified_base 3: mod_base = um
  modified_base 4: mod_base = cm
  modified_base 5: mod_base = gm
  modified_base 6: mod_base = OTHER; note = 2'-O-methyladenosine
  modified_base 7: mod_base = um
  modified_base 8: mod_base = um
  modified_base 9: mod_base = OTHER; note = 2'-fluorocytidine
  modified_base 10: mod_base = OTHER; note = 2'-fluoroadenosine
  modified_base 11: mod_base = OTHER; note = 2'-fluoroguanosine
  modified_base 12: mod_base = OTHER; note = 2'-O-methyladenosine
  modified_base 13: mod_base = um
  modified_base 14: mod_base = cm
  modified_base 15: mod_base = um
  modified_base 16: mod_base = um
  modified_base 17: mod_base = OTHER; note = 2'-O-methyladenosine
  modified_base 18: mod_base = OTHER; note = 2'-O-methyladenosine
  modified_base 19: mod_base = um
  modified_base 20: mod_base = gm
  modified_base 21: mod_base = OTHER; note = 2'-O-methyladenosine
  source 1..21: mol_type = other RNA
ggtcgattcagatcttaatga

SEQ ID NO: 336 - RNA, 21 nt, synthetic construct
  modified_base 1: mod_base = gm
  modified_base 2: mod_base = gm
  modified_base 3: mod_base = um
  modified_base 4: mod_base = cm
  modified_base 5: mod_base = cm
  modified_base 6: mod_base = OTHER; note = 2'-O-methyladenosine
  modified_base 7: mod_base = gm
  modified_base 8: mod_base = OTHER; note = 2'-O-methyladenosine
  modified_base 9: mod_base = OTHER; note = 2'-fluorouridine
  modified_base 10: mod_base = OTHER; note = 2'-fluoroguanosine
  modified_base 11: mod_base = OTHER; note = 2'-fluoroadenosine
  modified_base 12: mod_base = cm
  modified_base 13: mod_base = cm
  modified_base 14: mod_base = OTHER; note = 2'-O-methyladenosine
  modified_base 15: mod_base = OTHER; note = 2'-O-methyladenosine
  modified_base 16: mod_base = OTHER; note = 2'-O-methyladenosine
  modified_base 17: mod_base = um
  modified_base 18: mod_base = um
  modified_base 19: mod_base = gm
  modified_base 20: mod_base = gm
  modified_base 21: mod_base = OTHER; note = 2'-O-methyladenosine
  source 1..21: mol_type = other RNA
ggtccagatgaccaaattgga

SEQ ID NO: 337 - RNA, 21 nt, synthetic construct
  modified_base 1: mod_base = gm
  modified_base 2: mod_base = cm
  modified_base 3: mod_base = cm
  modified_base 4: mod_base = gm
  modified_base 5: mod_base = cm
  modified_base 6: mod_base = OTHER; note = 2'-O-methyladenosine
  modified_base 7: mod_base = OTHER; note = 2'-O-methyladenosine
  modified_base 8: mod_base = OTHER; note = 2'-O-methyladenosine
  modified_base 9: mod_base = OTHER; note = 2'-fluorouridine
  modified_base 10: mod_base = OTHER; note = 2'-fluorouridine
  modified_base 11: mod_base = OTHER; note = 2'-fluoroguanosine
  modified_base 12: mod_base = cm
  modified_base 13: mod_base = OTHER; note = 2'-O-methyladenosine
  modified_base 14: mod_base = cm
  modified_base 15: mod_base = OTHER; note = 2'-O-methyladenosine
  modified_base 16: mod_base = OTHER; note = 2'-O-methyladenosine
  modified_base 17: mod_base = um
  modified_base 18: mod_base = um
  modified_base 19: mod_base = um
  modified_base 20: mod_base = gm
  modified_base 21: mod_base = OTHER; note = 2'-O-methyladenosine
  source 1..21: mol_type = other RNA
gccgcaaattgcacaatttga

SEQ ID NO: 338 - RNA, 21 nt, synthetic construct
  modified_base 1: mod_base = gm
  modified_base 2: mod_base = um
  modified_base 3: mod_base = gm
  modified_base 4: mod_base = OTHER; note = 2'-O-methyladenosine
  modified_base 5: mod_base = cm
  modified_base 6: mod_base = gm
  modified_base 7: mod_base = cm
  modified_base 8: mod_base = OTHER; note = 2'-O-methyladenosine
  modified_base 9: mod_base = OTHER; note = 2'-fluorouridine
  modified_base 10: mod_base = OTHER; note = 2'-fluoroadenosine
  modified_base 11: mod_base = OTHER; note = 2'-fluorocytidine
  modified_base 12: mod_base = OTHER; note = 2'-O-methyladenosine
  modified_base 13: mod_base = OTHER; note = 2'-O-methyladenosine
  modified_base 14: mod_base = OTHER; note = 2'-O-methyladenosine
  modified_base 15: mod_base = OTHER; note = 2'-O-methyladenosine
  modified_base 16: mod_base = cm
  modified_base 17: mod_base = OTHER; note = 2'-O-methyladenosine
  modified_base 18: mod_base = um
  modified_base 19: mod_base = um
  modified_base 20: mod_base = cm
  modified_base 21: mod_base = OTHER; note = 2'-O-methyladenosine
  source 1..21: mol_type = other RNA
gtgacgcatacaaaacattca

SEQ ID NO: 339 - RNA, 21 nt, synthetic construct
  modified_base 1: mod_base = cm
  modified_base 2: mod_base = OTHER; note = 2'-O-methyl-2-aminoadenosine
  modified_base 3: mod_base = OTHER; note = 2'-O-methyladenosine
  modified_base 4: mod_base = gm
  modified_base 5: mod_base = gm
  modified_base 6: mod_base = OTHER; note = 2'-O-methyladenosine
  modified_base 7: mod_base = OTHER; note = 2'-O-methyladenosine
  modified_base 8: mod_base = gm
  modified_base 9: mod_base = OTHER; note = 2'-fluoroadenosine
  modified_base 10: mod_base = OTHER; note = 2'-fluorocytidine
  modified_base 11: mod_base = OTHER; note = 2'-fluorocytidine
  modified_base 12: mod_base = um
  modified_base 13: mod_base = um
  modified_base 14: mod_base = OTHER; note = 2'-O-methyladenosine
  modified_base 15: mod_base = OTHER; note = 2'-O-methyladenosine
  modified_base 16: mod_base = OTHER; note = 2'-O-methyladenosine
  modified_base 17: mod_base = um
  modified_base 18: mod_base = um
  modified_base 19: mod_base = cm
  modified_base 20: mod_base = cm
  modified_base 21: mod_base = OTHER; note = 2'-O-methyladenosine
  source 1..21: mol_type = other RNA
cnaggaagaccttaaattcca

SEQ ID NO: 340 - RNA, 21 nt, synthetic construct
  modified_base 1: mod_base = gm
  modified_base 2: mod_base = um
  modified_base 3: mod_base = cm
  modified_base 4: mod_base = cm
  modified_base 5: mod_base = OTHER; note = 2'-O-methyladenosine
  modified_base 6: mod_base = OTHER; note = 2'-O-methyladenosine
  modified_base 7: mod_base = um
  modified_base 8: mod_base = um
  modified_base 9: mod_base = OTHER; note = 2'-fluoroadenosine
  modified_base 10: mod_base = OTHER; note = 2'-fluoroadenosine
  modified_base 11: mod_base = OTHER; note = 2'-fluorocytidine
  modified_base 12: mod_base = OTHER; note = 2'-O-methyladenosine
  modified_base 13: mod_base = cm
  modified_base 14: mod_base = cm
  modified_base 15: mod_base = OTHER; note = 2'-O-methyladenosine
  modified_base 16: mod_base = OTHER; note = 2'-O-methyladenosine
  modified_base 17: mod_base = um
  modified_base 18: mod_base = OTHER; note = 2'-O-methyladenosine
  modified_base 19: mod_base = gm
  modified_base 20: mod_base = cm
  modified_base 21: mod_base = OTHER; note = 2'-O-methyladenosine
  source 1..21: mol_type = other RNA
gtccaattaacaccaatagca

SEQ ID NO: 341 - RNA, 21 nt, synthetic construct
  modified_base 1: mod_base = gm
  modified_base 2: mod_base = um
  modified_base 3: mod_base = cm
  modified_base 4: mod_base = cm
  modified_base 5: mod_base = OTHER; note = 2'-O-methyladenosine
  modified_base 6: mod_base = OTHER; note = 2'-O-methyladenosine
  modified_base 7: mod_base = gm
  modified_base 8: mod_base = OTHER; note = 2'-O-methyladenosine
  modified_base 9: mod_base = OTHER; note = 2'-fluorouridine
  modified_base 10: mod_base = OTHER; note = 2'-fluoroguanosine
  modified_base 11: mod_base = OTHER; note = 2'-fluoroguanosine
  modified_base 12: mod_base = um
  modified_base 13: mod_base = OTHER; note = 2'-O-methyladenosine
  modified_base 14: mod_base = um
  modified_base 15: mod_base = um
  modified_base 16: mod_base = um
  modified_base 17: mod_base = cm
  modified_base 18: mod_base = um
  modified_base 19: mod_base = OTHER; note = 2'-O-methyladenosine
  modified_base 20: mod_base = cm
  modified_base 21: mod_base = um
  source 1..21: mol_type = other RNA
gtccaagatggtatttctact

SEQ ID NO: 342 - RNA, 21 nt, synthetic construct
  modified_base 1: mod_base = cm
  modified_base 2: mod_base = OTHER; note = 2'-O-methyl-2-aminoadenosine
  modified_base 3: mod_base = OTHER; note = 2'-O-methyladenosine
  modified_base 4: mod_base = gm
  modified_base 5: mod_base = OTHER; note = 2'-O-methyladenosine
  modified_base 6: mod_base = um
  modified_base 7: mod_base = gm
  modified_base 8: mod_base = gm
  modified_base 9: mod_base = OTHER; note = 2'-fluorouridine
  modified_base 10: mod_base = OTHER; note = 2'-fluoroadenosine
  modified_base 11: mod_base = OTHER; note = 2'-fluorouridine
  modified_base 12: mod_base = um
  modified_base 13: mod_base = um
  modified_base 14: mod_base = cm
  modified_base 15: mod_base = um
  modified_base 16: mod_base = OTHER; note = 2'-O-methyladenosine
  modified_base 17: mod_base = cm
  modified_base 18: mod_base = um
  modified_base 19: mod_base = OTHER; note = 2'-O-methyladenosine
  modified_base 20: mod_base = cm
  modified_base 21: mod_base = OTHER; note = 2'-O-methyladenosine
  source 1..21: mol_type = other RNA
cnagatggtatttctactaca

SEQ ID NO: 343 - RNA, 21 nt, synthetic construct
  modified_base 1: mod_base = gm
  modified_base 2: mod_base = um
  modified_base 3: mod_base = gm
  modified_base 4: mod_base = OTHER; note = 2'-O-methyladenosine
  modified_base 5: mod_base = OTHER; note = 2'-O-methyladenosine
  modified_base 6: mod_base = um
  modified_base 7: mod_base = OTHER; note = 2'-O-methyladenosine
  modified_base 8: mod_base = cm
  modified_base 9: mod_base = OTHER; note = 2'-fluoroadenosine
  modified_base 10: mod_base = OTHER; note = 2'-fluorocytidine
  modified_base 11: mod_base = OTHER; note = 2'-fluorocytidine
  modified_base 12: mod_base = OTHER; note = 2'-O-methyladenosine
  modified_base 13: mod_base = OTHER; note = 2'-O-methyladenosine
  modified_base 14: mod_base = OTHER; note = 2'-O-methyladenosine
  modified_base 15: mod_base = OTHER; note = 2'-O-methyladenosine
  modified_base 16: mod_base = gm
  modified_base 17: mod_base = OTHER; note = 2'-O-methyladenosine
  modified_base 18: mod_base = um
  modified_base 19: mod_base = cm
  modified_base 20: mod_base = OTHER; note = 2'-O-methyladenosine
  modified_base 21: mod_base = OTHER; note = 2'-O-methyladenosine
  source 1..21: mol_type = other RNA
gtgaatacaccaaaagatcaa

SEQ ID NO: 344 - RNA, 21 nt, synthetic construct
  modified_base 1: mod_base = cm
  modified_base 2: mod_base = um
  modified_base 3: mod_base = gm
  modified_base 4: mod_base = um
  modified_base 5: mod_base = cm
  modified_base 6: mod_base = OTHER; note = 2'-O-methyladenosine
  modified_base 7: mod_base = cm
  modified_base 8: mod_base = um
  modified_base 9: mod_base = OTHER; note = 2'-fluoroadenosine
  modified_base 10: mod_base = OTHER; note = 2'-fluoroadenosine
  modified_base 11: mod_base = OTHER; note = 2'-fluoroguanosine
  modified_base 12: mod_base = OTHER; note = 2'-O-methyladenosine
  modified_base 13: mod_base = OTHER; note = 2'-O-methyladenosine
  modified_base 14: mod_base = OTHER; note = 2'-O-methyladenosine
  modified_base 15: mod_base = um
  modified_base 16: mod_base = cm
  modified_base 17: mod_base = um
  modified_base 18: mod_base = OTHER; note = 2'-O-methylinosine
  modified_base 19: mod_base = cm
  modified_base 20: mod_base = um
  modified_base 21: mod_base = OTHER; note = 2'-O-methyladenosine
  source 1..21: mol_type = other RNA
ctgtcactaagaaatctncta

SEQ ID NO: 345 - RNA, 21 nt, synthetic construct
  modified_base 1: mod_base = cm
  modified_base 2: mod_base = cm
  modified_base 3: mod_base = OTHER; note = 2'-O-methyladenosine
  modified_base 4: mod_base = cm
  modified_base 5: mod_base = um
  modified_base 6: mod_base = OTHER; note = 2'-O-methyladenosine
  modified_base 7: mod_base = OTHER; note = 2'-O-methyladenosine
  modified_base 8: mod_base = OTHER; note = 2'-O-methyladenosine
  modified_base 9: mod_base = OTHER; note = 2'-fluoroguanosine
  modified_base 10: mod_base = OTHER; note = 2'-fluorocytidine
  modified_base 11: mod_base = OTHER; note = 2'-fluoroadenosine
  modified_base 12: mod_base = um
  modified_base 13: mod_base = OTHER; note = 2'-O-methyladenosine
  modified_base 14: mod_base = cm
  modified_base 15: mod_base = OTHER; note = 2'-O-methyladenosine
  modified_base 16: mod_base = OTHER; note = 2'-O-methyladenosine
  modified_base 17: mod_base = um
  modified_base 18: mod_base = gm
  modified_base 19: mod_base = um
  modified_base 20: mod_base = OTHER; note = 2'-O-methyladenosine
  modified_base 21: mod_base = OTHER; note = 2'-O-methyladenosine
  source 1..21: mol_type = other RNA
ccactaaagcatacaatgtaa

SEQ ID NO: 346 - RNA, 21 nt, synthetic construct
  modified_base 1: mod_base = gm
  modified_base 2: mod_base = cm
  modified_base 3: mod_base = OTHER; note = 2'-O-methyladenosine
  modified_base 4: mod_base = gm
  modified_base 5: mod_base = OTHER; note = 2'-O-methyladenosine
  modified_base 6: mod_base = cm
  modified_base 7: mod_base = OTHER; note = 2'-O-methyladenosine
  modified_base 8: mod_base = OTHER; note = 2'-O-methyladenosine
  modified_base 9: mod_base = OTHER; note = 2'-fluoroguanosine
  modified_base 10: mod_base = OTHER; note = 2'-fluoroguanosine
  modified_base 11: mod_base = OTHER; note = 2'-fluoroadenosine
  modified_base 12: mod_base = OTHER; note = 2'-O-methyladenosine
  modified_base 13: mod_base = cm
  modified_base 14: mod_base = um
  modified_base 15: mod_base = gm
  modified_base 16: mod_base = OTHER; note = 2'-O-methyladenosine
  modified_base 17: mod_base = um
  modified_base 18: mod_base = um
  modified_base 19: mod_base = OTHER; note = 2'-O-methyladenosine
  modified_base 20: mod_base = cm
  modified_base 21: mod_base = OTHER; note = 2'-O-methyladenosine
  source 1..21: mol_type = other RNA
gcagacaaggaactgattaca

SEQ ID NO: 347 - RNA, 21 nt, synthetic construct
  modified_base 1: mod_base = gm
  modified_base 2: mod_base = gm
  modified_base 3: mod_base = OTHER; note = 2'-O-methyladenosine
  modified_base 4: mod_base = cm
  modified_base 5: mod_base = OTHER; note = 2'-O-methyladenosine
  modified_base 6: mod_base = OTHER; note = 2'-O-methyladenosine
  modified_base 7: mod_base = gm
  modified_base 8: mod_base = gm
  modified_base 9: mod_base = OTHER; note = 2'-fluoroadenosine
  modified_base 10: mod_base = OTHER; note = 2'-fluoroadenosine
  modified_base 11: mod_base = OTHER; note = 2'-fluorocytidine
  modified_base 12: mod_base = um
  modified_base 13: mod_base = gm
  modified_base 14: mod_base = OTHER; note = 2'-O-methyladenosine
  modified_base 15: mod_base = um
  modified_base 16: mod_base = um
  modified_base 17: mod_base = OTHER; note = 2'-O-methyladenosine
  modified_base 18: mod_base = cm
  modified_base 19: mod_base = OTHER; note = 2'-O-methyladenosine
  modified_base 20: mod_base = OTHER; note = 2'-O-methyladenosine
  modified_base 21: mod_base = OTHER; note = 2'-O-methyladenosine
  source 1..21: mol_type = other RNA
ggacaaggaactgattacaaa

SEQ ID NO: 348 - RNA, 21 nt, synthetic construct
  modified_base 1: mod_base = gm
  modified_base 2: mod_base = gm
  modified_base 3: mod_base = OTHER; note = 2'-O-methyladenosine
  modified_base 4: mod_base = OTHER; note = 2'-O-methyladenosine
  modified_base 5: mod_base = cm
  modified_base 6: mod_base = um
  modified_base 7: mod_base = gm
  modified_base 8: mod_base = OTHER; note = 2'-O-methyladenosine
  modified_base 9: mod_base = OTHER; note = 2'-fluorouridine
  modified_base 10: mod_base = OTHER; note = 2'-fluorouridine
  modified_base 11: mod_base = OTHER; note = 2'-fluoroadenosine
  modified_base 12: mod_base = cm
  modified_base 13: mod_base = OTHER; note = 2'-O-methyladenosine
  modified_base 14: mod_base = OTHER; note = 2'-O-methyladenosine
  modified_base 15: mod_base = OTHER; note = 2'-O-methyladenosine
  modified_base 16: mod_base = cm
  modified_base 17: mod_base = OTHER; note = 2'-O-methyladenosine
  modified_base 18: mod_base = um
  modified_base 19: mod_base = um
  modified_base 20: mod_base = gm
  modified_base 21: mod_base = OTHER; note = 2'-O-methyladenosine
  source 1..21: mol_type = other RNA
ggaactgattacaaacattga

SEQ ID NO: 349 - RNA, 21 nt, synthetic construct
  modified_base 1: mod_base = gm
  modified_base 2: mod_base = cm
  modified_base 3: mod_base = um
  modified_base 4: mod_base = gm
  modified_base 5: mod_base = OTHER; note = 2'-O-methyladenosine
  modified_base 6: mod_base = OTHER; note = 2'-O-methyladenosine
  modified_base 7: mod_base = um
  modified_base 8: mod_base = OTHER; note = 2'-O-methyladenosine
  modified_base 9: mod_base = OTHER; note = 2'-fluoroadenosine
  modified_base 10: mod_base = OTHER; note = 2'-fluoroguanosine
  modified_base 11: mod_base = OTHER; note = 2'-fluorocytidine
  modified_base 12: mod_base = OTHER; note = 2'-O-methyladenosine
  modified_base 13: mod_base = um
  modified_base 14: mod_base = OTHER; note = 2'-O-methyladenosine
  modified_base 15: mod_base = um
  modified_base 16: mod_base = um
  modified_base 17: mod_base = gm
  modified_base 18: mod_base = OTHER; note = 2'-O-methyladenosine
  modified_base 19: mod_base = cm
  modified_base 20: mod_base = OTHER; note = 2'-O-methylinosine
  modified_base 21: mod_base = OTHER; note = 2'-O-methyladenosine
  source 1..21: mol_type = other RNA
gctgaataagcatattgacna

SEQ ID NO: 350 - RNA, 21 nt, synthetic construct
  modified_base 1: mod_base = gm
  modified_base 1^2: mod_base = OTHER; note = phosphorothioate linkage
  modified_base 2: mod_base = cm
  modified_base 3: mod_base = um
  modified_base 4: mod_base = um
  modified_base 5: mod_base = cm
  modified_base 6: mod_base = um
  modified_base 7: mod_base = um
  modified_base 8: mod_base = OTHER; note = 2'-O-methyladenosine
  modified_base 9: mod_base = OTHER; note = 2'-fluoroadenosine
  modified_base 10: mod_base = OTHER; note = 2'-fluoroguanosine
  modified_base 11: mod_base = OTHER; note = 2'-fluoroadenosine
  modified_base 12: mod_base = gm
  modified_base 13: mod_base = um
  modified_base 14: mod_base = gm
  modified_base 15: mod_base = cm
  modified_base 16: mod_base = um
  modified_base 17: mod_base = um
  modified_base 18: mod_base = OTHER; note = 2'-O-methyladenosine
  modified_base 19: mod_base = um
  modified_base 20: mod_base = gm
  modified_base 21: mod_base = OTHER; note = 2'-O-methyladenosine
  source 1..21: mol_type = other RNA
gcttcttaagagtgcttatga

SEQ ID NO: 351 - RNA, 21 nt, synthetic construct
  modified_base 1: mod_base = cm
  modified_base 1^2: mod_base = OTHER; note = phosphorothioate linkage
  modified_base 2: mod_base = um
  modified_base 3: mod_base = um
  modified_base 4: mod_base = OTHER; note = 2'-O-methyladenosine
  modified_base 5: mod_base = gm
  modified_base 6: mod_base = OTHER; note = 2'-O-methyladenosine
  modified_base 7: mod_base = cm
  modified_base 8: mod_base = OTHER; note = 2'-O-methyladenosine
  modified_base 9: mod_base = OTHER; note = 2'-fluoroadenosine
  modified_base 10: mod_base = OTHER; note = 2'-fluorouridine
  modified_base 11: mod_base = OTHER; note = 2'-fluoroguanosine
  modified_base 12: mod_base = um
  modified_base 13: mod_base = cm
  modified_base 14: mod_base = um
  modified_base 15: mod_base = um
  modified_base 16: mod_base = OTHER; note = 2'-O-methyladenosine
  modified_base 17: mod_base = um
  modified_base 18: mod_base = cm
  modified_base 19: mod_base = um
  modified_base 20: mod_base = OTHER; note = 2'-O-methyladenosine
  modified_base 21: mod_base = OTHER; note = 2'-O-methyladenosine
  source 1..21: mol_type = other RNA
cttagacaatgtcttatctaa

SEQ ID NO: 352 - RNA, 21 nt, synthetic construct
  modified_base 1: mod_base = gm
  modified_base 1^2: mod_base = OTHER; note = phosphorothioate linkage
  modified_base 2: mod_base = cm
  modified_base 3: mod_base = OTHER; note = 2'-O-methyladenosine
  modified_base 4: mod_base = um
  modified_base 5: mod_base = um
  modified_base 6: mod_base = OTHER; note = 2'-O-methyladenosine
  modified_base 7: mod_base = OTHER; note = 2'-O-methyladenosine
  modified_base 8: mod_base = um
  modified_base 9: mod_base = OTHER; note = 2'-fluoroguanosine
  modified_base 10: mod_base = OTHER; note = 2'-fluoroguanosine
  modified_base 11: mod_base = OTHER; note = 2'-fluorocytidine
  modified_base 12: mod_base = OTHER; note = 2'-O-methyladenosine
  modified_base 13: mod_base = OTHER; note = 2'-O-methyladenosine
  modified_base 14: mod_base = um
  modified_base 15: mod_base = cm
  modified_base 16: mod_base = um
  modified_base 17: mod_base = um
  modified_base 18: mod_base = cm
  modified_base 19: mod_base = OTHER; note = 2'-O-methyladenosine
  modified_base 20: mod_base = um
  modified_base 21: mod_base = OTHER; note = 2'-O-methyladenosine
  source 1..21: mol_type = other RNA
gcattaatggcaatcttcata

SEQ ID NO: 353 - RNA, 21 nt, synthetic construct
  modified_base 1: mod_base = gm
  modified_base 1^2: mod_base = OTHER; note = phosphorothioate linkage
  modified_base 2: mod_base = OTHER; note = 2'-O-methyladenosine
  modified_base 3: mod_base = um
  modified_base 4: mod_base = gm
  modified_base 5: mod_base = cm
  modified_base 6: mod_base = um
  modified_base 7: mod_base = um
  modified_base 8: mod_base = OTHER; note = 2'-O-methyladenosine
  modified_base 9: mod_base = OTHER; note = 2'-fluorocytidine
  modified_base 10: mod_base = OTHER; note = 2'-fluoroguanosine
  modified_base 11: mod_base = OTHER; note = 2'-fluorouridine
  modified_base 12: mod_base = um
  modified_base 13: mod_base = OTHER; note = 2'-O-methyladenosine
  modified_base 14: mod_base = OTHER; note = 2'-O-methyladenosine
  modified_base 15: mod_base = um
  modified_base 16: mod_base = OTHER; note = 2'-O-methyladenosine
  modified_base 17: mod_base = cm
  modified_base 18: mod_base = gm
  modified_base 19: mod_base = um
  modified_base 20: mod_base = um
  modified_base 21: mod_base = um
  source 1..21: mol_type = other RNA
gatgcttacgttaatacgttt

SEQ ID NO: 354 - RNA, 21 nt, synthetic construct
  modified_base 1: mod_base = gm
  modified_base 1^2: mod_base = OTHER; note = phosphorothioate linkage
  modified_base 2: mod_base = cm
  modified_base 3: mod_base = OTHER; note = 2'-O-methyladenosine
  modified_base 4: mod_base = cm
  modified_base 5: mod_base = cm
  modified_base 6: mod_base = um
  modified_base 7: mod_base = um
  modified_base 8: mod_base = um
  modified_base 9: mod_base = OTHER; note = 2'-fluoroguanosine
  modified_base 10: mod_base = OTHER; note = 2'-fluoroadenosine
  modified_base 11: mod_base = OTHER; note = 2'-fluorocytidine
  modified_base 12: mod_base = OTHER; note = 2'-O-methyladenosine
  modified_base 13: mod_base = OTHER; note = 2'-O-methyladenosine
  modified_base 14: mod_base = um
  modified_base 15: mod_base = cm
  modified_base 16: mod_base = um
  modified_base 17: mod_base = um
  modified_base 18: mod_base = OTHER; note = 2'-O-methyladenosine
  modified_base 19: mod_base = OTHER; note = 2'-O-methyladenosine
  modified_base 20: mod_base = gm
  modified_base 21: mod_base = OTHER; note = 2'-O-methyladenosine
  source 1..21: mol_type = other RNA
gcacctttgacaatcttaaga

SEQ ID NO: 355 - RNA, 21 nt, synthetic construct
  modified_base 1: mod_base = gm
  modified_base 1^2: mod_base = OTHER; note = phosphorothioate linkage
  modified_base 2: mod_base = gm
  modified_base 3: mod_base = OTHER; note = 2'-O-methyladenosine
  modified_base 4: mod_base = OTHER; note = 2'-O-methyladenosine
  modified_base 5: mod_base = gm
  modified_base 6: mod_base = um
  modified_base 7: mod_base = OTHER; note = 2'-O-methyladenosine
  modified_base 8: mod_base = gm
  modified_base 9: mod_base = OTHER; note = 2'-fluorouridine
  modified_base 10: mod_base = OTHER; note = 2'-fluoroguanosine
  modified_base 11: mod_base = OTHER; note = 2'-fluoroguanosine
  modified_base 12: mod_base = OTHER; note = 2'-O-methyladenosine
  modified_base 13: mod_base = OTHER; note = 2'-O-methyladenosine
  modified_base 14: mod_base = OTHER; note = 2'-O-methyladenosine
  modified_base 15: mod_base = OTHER; note = 2'-O-methyladenosine
  modified_base 16: mod_base = um
  modified_base 17: mod_base = cm
  modified_base 18: mod_base = cm
  modified_base 19: mod_base = um
  modified_base 20: mod_base = OTHER; note = 2'-O-methyladenosine
  modified_base 21: mod_base = OTHER; note = 2'-O-methyladenosine
  source 1..21: mol_type = other RNA
ggaagtagtggaaaatcctaa

SEQ ID NO: 356 - RNA, 21 nt, synthetic construct
  modified_base 1: mod_base = cm
  modified_base 1^2: mod_base = OTHER; note = phosphorothioate linkage
  modified_base 2: mod_base = cm
  modified_base 3: mod_base = um
  modified_base 4: mod_base = um
  modified_base 5: mod_base = um
  modified_base 6: mod_base = um
  modified_base 7: mod_base = gm
  modified_base 8: mod_base = OTHER; note = 2'-O-methyladenosine
  modified_base 9: mod_base = OTHER; note = 2'-fluorouridine
  modified_base 10: mod_base = OTHER; note = 2'-fluoroguanosine
  modified_base 11: mod_base = OTHER; note = 2'-fluorouridine
  modified_base 12: mod_base = um
  modified_base 13: mod_base = gm
  modified_base 14: mod_base = um
  modified_base 15: mod_base = um
  modified_base 16: mod_base = OTHER; note = 2'-O-methyladenosine
  modified_base 17: mod_base = gm
  modified_base 18: mod_base = OTHER; note = 2'-O-methyladenosine
  modified_base 19: mod_base = cm
  modified_base 20: mod_base = OTHER; note = 2'-O-methyladenosine
  modified_base 21: mod_base = OTHER; note = 2'-O-methyladenosine
  source 1..21: mol_type = other RNA
ccttttgatgttgttagacaa

SEQ ID NO: 357 - RNA, 21 nt, synthetic construct
  modified_base 1: mod_base = um
  modified_base 1^2: mod_base = OTHER; note = phosphorothioate linkage
  modified_base 2: mod_base = gm
  modified_base 3: mod_base = gm
  modified_base 4: mod_base = um
  modified_base 5: mod_base = OTHER; note = 2'-O-methyladenosine
  modified_base 6: mod_base = OTHER; note = 2'-O-methyladenosine
  modified_base 7: mod_base = um
  modified_base 8: mod_base = gm
  modified_base 9: mod_base = OTHER; note = 2'-fluorocytidine
  modified_base 10: mod_base = OTHER; note = 2'-fluorouridine
  modified_base 11: mod_base = OTHER; note = 2'-fluorouridine
  modified_base 12: mod_base = um
  modified_base 13: mod_base = OTHER; note = 2'-O-methyladenosine
  modified_base 14: mod_base = gm
  modified_base 15: mod_base = OTHER; note = 2'-O-methyladenosine
  modified_base 16: mod_base = um
  modified_base 17: mod_base = cm
  modified_base 18: mod_base = OTHER; note = 2'-O-methyladenosine
  modified_base 19: mod_base = OTHER; note = 2'-O-methyladenosine
  modified_base 20: mod_base = gm
  modified_base 21: mod_base = OTHER; note = 2'-O-methyladenosine
  source 1..21: mol_type = other RNA
tggtaatgctttagatcaaga

SEQ ID NO: 358 - RNA, 21 nt, synthetic construct
  modified_base 1: mod_base = cm
  modified_base 1^2: mod_base = OTHER; note = phosphorothioate linkage
  modified_base 2: mod_base = OTHER; note = 2'-O-methyladenosine
  modified_base 3: mod_base = OTHER; note = 2'-O-methyladenosine
  modified_base 4: mod_base = gm
  modified_base 5: mod_base = cm
  modified_base 6: mod_base = um
  modified_base 7: mod_base = OTHER; note = 2'-O-methyladenosine
  modified_base 8: mod_base = um
  modified_base 9: mod_base = OTHER; note = 2'-fluoroguanosine
  modified_base 10: mod_base = OTHER; note = 2'-fluoroadenosine
  modified_base 11: mod_base = OTHER; note = 2'-fluorocytidine
  modified_base 12: mod_base = cm
  modified_base 13: mod_base = cm
  modified_base 14: mod_base = OTHER; note = 2'-O-methyladenosine
  modified_base 15: mod_base = OTHER; note = 2'-O-methyladenosine
  modified_base 16: mod_base = OTHER; note = 2'-O-methyladenosine
  modified_base 17: mod_base = um
  modified_base 18: mod_base = gm
  modified_base 19: mod_base = um
  modified_base 20: mod_base = OTHER; note = 2'-O-methyladenosine
  modified_base 21: mod_base = um
  source 1..21: mol_type = other RNA
caagctatgacccaaatgtat

SEQ ID NO: 359 - RNA, 21 nt, synthetic construct
  modified_base 1: mod_base = gm
  modified_base 1^2: mod_base = OTHER; note = phosphorothioate linkage
  modified_base 2: mod_base = um
  modified_base 3: mod_base = cm
  modified_base 4: mod_base = cm
  modified_base 5: mod_base = OTHER; note = 2'-O-methyladenosine
  modified_base 6: mod_base = OTHER; note = 2'-O-methyladenosine
  modified_base 7: mod_base = gm
  modified_base 8: mod_base = OTHER; note = 2'-O-methyladenosine
  modified_base 9: mod_base = OTHER; note = 2'-fluorouridine
  modified_base 10: mod_base = OTHER; note = 2'-fluoroguanosine
  modified_base 11: mod_base = OTHER; note = 2'-fluoroguanosine
  modified_base 12: mod_base = um
  modified_base 13: mod_base = OTHER; note = 2'-O-methyladenosine
  modified_base 14: mod_base = um
  modified_base 15: mod_base = um
  modified_base 16: mod_base = um
  modified_base 17: mod_base = cm
  modified_base 18: mod_base = um
  modified_base 19: mod_base = OTHER; note = 2'-O-methyladenosine
  modified_base 20: mod_base = cm
  modified_base 21: mod_base = um
  source 1..21: mol_type = other RNA
gtccaagatggtatttctact

SEQ ID NO: 360 - RNA, 21 nt, synthetic construct
  modified_base 1: mod_base = cm
  modified_base 1^2: mod_base = OTHER; note = phosphorothioate linkage
  modified_base 2: mod_base = OTHER; note = 2'-O-methyladenosine
  modified_base 3: mod_base = OTHER; note = 2'-O-methyladenosine
  modified_base 4: mod_base = gm
  modified_base 5: mod_base = OTHER; note = 2'-O-methyladenosine
  modified_base 6: mod_base = um
  modified_base 7: mod_base = gm
  modified_base 8: mod_base = gm
  modified_base 9: mod_base = OTHER; note = 2'-fluorouridine
  modified_base 10: mod_base = OTHER; note = 2'-fluoroadenosine
  modified_base 11: mod_base = OTHER; note = 2'-fluorouridine
  modified_base 12: mod_base = um
  modified_base 13: mod_base = um
  modified_base 14: mod_base = cm
  modified_base 15: mod_base = um
  modified_base 16: mod_base = OTHER; note = 2'-O-methyladenosine
  modified_base 17: mod_base = cm
  modified_base 18: mod_base = um
  modified_base 19: mod_base = OTHER; note = 2'-O-methyladenosine
  modified_base 20: mod_base = cm
  modified_base 21: mod_base = OTHER; note = 2'-O-methyladenosine
  source 1..21: mol_type = other RNA
caagatggtatttctactaca

SEQ ID NO: 361 - RNA, 21 nt, synthetic construct
  modified_base 1: mod_base = cm
  modified_base 1^2: mod_base = OTHER; note = phosphorothioate linkage
  modified_base 2: mod_base = cm
  modified_base 3: mod_base = OTHER; note = 2'-O-methyladenosine
  modified_base 4: mod_base = cm
  modified_base 5: mod_base = um
  modified_base 6: mod_base = OTHER; note = 2'-O-methyladenosine
  modified_base 7: mod_base = OTHER; note = 2'-O-methyladenosine
  modified_base 8: mod_base = OTHER; note = 2'-O-methyladenosine
  modified_base 9: mod_base = OTHER; note = 2'-fluoroguanosine
  modified_base 10: mod_base = OTHER; note = 2'-fluorocytidine
  modified_base 11: mod_base = OTHER; note = 2'-fluoroadenosine
  modified_base 12: mod_base = um
  modified_base 13: mod_base = OTHER; note = 2'-O-methyladenosine
  modified_base 14: mod_base = cm
  modified_base 15: mod_base = OTHER; note = 2'-O-methyladenosine
  modified_base 16: mod_base = OTHER; note = 2'-O-methyladenosine
  modified_base 17: mod_base = um
  modified_base 18: mod_base = gm
  modified_base 19: mod_base = um
  modified_base 20: mod_base = OTHER; note = 2'-O-methyladenosine
  modified_base 21: mod_base = OTHER; note = 2'-O-methyladenosine
  source 1..21: mol_type = other RNA
ccactaaagcatacaatgtaa

SEQ ID NO: 362 - RNA, 21 nt, synthetic construct
  modified_base 1: mod_base = gm
  modified_base 1^2: mod_base = OTHER; note = phosphorothioate linkage
  modified_base 2: mod_base = gm
  modified_base 3: mod_base = OTHER; note = 2'-O-methyladenosine
  modified_base 4: mod_base = cm
  modified_base 5: mod_base = OTHER; note = 2'-O-methyladenosine
  modified_base 6: mod_base = OTHER; note = 2'-O-methyladenosine
  modified_base 7: mod_base = gm
  modified_base 8: mod_base = gm
  modified_base 9: mod_base = OTHER; note = 2'-fluoroadenosine
  modified_base 10: mod_base = OTHER; note = 2'-fluoroadenosine
  modified_base 11: mod_base = OTHER; note = 2'-fluorocytidine
  modified_base 12: mod_base = um
  modified_base 13: mod_base = gm
  modified_base 14: mod_base = OTHER; note = 2'-O-methyladenosine
  modified_base 15: mod_base = um
  modified_base 16: mod_base = um
  modified_base 17: mod_base = OTHER; note = 2'-O-methyladenosine
  modified_base 18: mod_base = cm
  modified_base 19: mod_base = OTHER; note = 2'-O-methyladenosine
  modified_base 20: mod_base = OTHER; note = 2'-O-methyladenosine
  modified_base 21: mod_base = OTHER; note = 2'-O-methyladenosine
  source 1..21: mol_type = other RNA
ggacaaggaactgattacaaa

SEQ ID NO: 363 - RNA, 21 nt, synthetic construct
  modified_base 1: mod_base = gm
  modified_base 1^2: mod_base = OTHER; note = phosphorothioate linkage
  modified_base 2: mod_base = cm
  modified_base 3: mod_base = OTHER; note = 2'-O-methyladenosine
  modified_base 4: mod_base = um
  modified_base 5: mod_base = gm
  modified_base 6: mod_base = gm
  modified_base 7: mod_base = um
  modified_base 8: mod_base = OTHER; note = 2'-O-methyladenosine
  modified_base 9: mod_base = OTHER; note = 2'-fluorocytidine
  modified_base 10: mod_base = OTHER; note = 2'-fluorocytidine
  modified_base 11: mod_base = OTHER; note = 2'-fluoroadenosine
  modified_base 12: mod_base = cm
  modified_base 13: mod_base = OTHER; note = 2'-O-methyladenosine
  modified_base 14: mod_base = um
  modified_base 15: mod_base = OTHER; note = 2'-O-methyladenosine
  modified_base 16: mod_base = um
  modified_base 17: mod_base = OTHER; note = 2'-O-methyladenosine
  modified_base 18: mod_base = um
  modified_base 19: mod_base = cm
  modified_base 20: mod_base = OTHER; note = 2'-O-methyladenosine
  modified_base 21: mod_base = OTHER; note = 2'-O-methyladenosine
  source 1..21: mol_type = other RNA
gcatggtaccacatatatcaa

SEQ ID NO: 364 - RNA, 21 nt, synthetic construct
  modified_base 1: mod_base = gm
  modified_base 1^2: mod_base = OTHER; note = phosphorothioate linkage
  modified_base 2: mod_base = um
  modified_base 3: mod_base = OTHER; note = 2'-O-methyladenosine
  modified_base 4: mod_base = cm
  modified_base 5: mod_base = um
  modified_base 6: mod_base = gm
  modified_base 7: mod_base = OTHER; note = 2'-O-methyladenosine
  modified_base 8: mod_base = cm
  modified_base 9: mod_base = OTHER; note = 2'-fluoroadenosine
  modified_base 10: mod_base = OTHER; note = 2'-fluorouridine
  modified_base 11: mod_base = OTHER; note = 2'-fluorouridine
  modified_base 12: mod_base = OTHER; note = 2'-O-methyladenosine
  modified_base 13: mod_base = gm
  modified_base 14: mod_base = OTHER; note = 2'-O-methyladenosine
  modified_base 15: mod_base = um
  modified_base 16: mod_base = OTHER; note = 2'-O-methyladenosine
  modified_base 17: mod_base = OTHER; note = 2'-O-methyladenosine
  modified_base 18: mod_base = um
  modified_base 19: mod_base = cm
  modified_base 20: mod_base = OTHER; note = 2'-O-methyladenosine
  modified_base 21: mod_base = OTHER; note = 2'-O-methyladenosine
  source 1..21: mol_type = other RNA
gtactgacattagataatcaa

SEQ ID NO: 365 - RNA, 21 nt, synthetic construct
  modified_base 1: mod_base = gm
  modified_base 1^2: mod_base = OTHER; note = phosphorothioate linkage
  modified_base 2: mod_base = gm
  modified_base 3: mod_base = OTHER; note = 2'-O-methyladenosine
  modified_base 4: mod_base = um
  modified_base 5: mod_base = gm
  modified_base 6: mod_base = um
  modified_base 7: mod_base = OTHER; note = 2'-O-methyladenosine
  modified_base 8: mod_base = OTHER; note = 2'-O-methyladenosine
  modified_base 9: mod_base = OTHER; note = 2'-fluoroadenosine
  modified_base 10: mod_base = OTHER; note = 2'-fluorocytidine
  modified_base 11: mod_base = OTHER; note = 2'-fluorouridine
  modified_base 12: mod_base = um
  modified_base 13: mod_base = OTHER; note = 2'-O-methyladenosine
  modified_base 14: mod_base = cm
  modified_base 15: mod_base = OTHER; note = 2'-O-methyladenosine
  modified_base 16: mod_base = um
  modified_base 17: mod_base = OTHER; note = 2'-O-methyladenosine
  modified_base 18: mod_base = gm
  modified_base 19: mod_base = cm
  modified_base 20: mod_base = um
  modified_base 21: mod_base = OTHER; note = 2'-O-methyladenosine
  source 1..21: mol_type = other RNA
ggatgtaaacttacatagcta

SEQ ID NO: 366 - RNA, 21 nt, synthetic construct
  modified_base 1: mod_base = cm
  modified_base 1^2: mod_base = OTHER; note = phosphorothioate linkage
  modified_base 2: mod_base = OTHER; note = 2'-O-methyladenosine
  modified_base 3: mod_base = um
  modified_base 4: mod_base = OTHER; note = 2'-O-methyladenosine
  modified_base 5: mod_base = cm
  modified_base 6: mod_base = OTHER; note = 2'-O-methyladenosine
  modified_base 7: mod_base = OTHER; note = 2'-O-methyladenosine
  modified_base 8: mod_base = um
  modified_base 9: mod_base = OTHER; note = 2'-fluoroguanosine
  modified_base 10: mod_base = OTHER; note = 2'-fluorocytidine
  modified_base 11: mod_base = OTHER; note = 2'-fluorouridine
  modified_base 12: mod_base = OTHER; note = 2'-O-methyladenosine
  modified_base 13: mod_base = gm
  modified_base 14: mod_base = um
  modified_base 15: mod_base = um
  modified_base 16: mod_base = OTHER; note = 2'-O-methyladenosine
  modified_base 17: mod_base = OTHER; note = 2'-O-methyladenosine
  modified_base 18: mod_base = OTHER; note = 2'-O-methyladenosine
  modified_base 19: mod_base = cm
  modified_base 20: mod_base = OTHER; note = 2'-O-methyladenosine
  modified_base 21: mod_base = OTHER; note = 2'-O-methyladenosine
  source 1..21: mol_type = other RNA
catacaatgctagttaaacaa

SEQ ID NO: 367 - RNA, 21 nt, synthetic construct
  modified_base 1: mod_base = um
  modified_base 1^2: mod_base = OTHER; note = phosphorothioate linkage
  modified_base 2: mod_base = gm
  modified_base 3: mod_base = cm
  modified_base 4: mod_base = um
  modified_base 5: mod_base = gm
  modified_base 6: mod_base = um
  modified_base 7: mod_base = gm
  modified_base 8: mod_base = gm
  modified_base 9: mod_base = OTHER; note = 2'-fluorouridine
  modified_base 10: mod_base = um
  modified_base 11: mod_base = OTHER; note = 2'-fluoroadenosine
  modified_base 12: mod_base = um
  modified_base 13: mod_base = OTHER; note = 2'-fluoroadenosine
  modified_base 14: mod_base = cm
  modified_base 15: mod_base = cm
  modified_base 16: mod_base = um
  modified_base 17: mod_base = OTHER; note = 2'-O-methyladenosine
  modified_base 18: mod_base = cm
  modified_base 19: mod_base = um
  modified_base 20: mod_base = OTHER; note = 2'-O-methyladenosine
  modified_base 21: mod_base = OTHER; note = 2'-O-methyladenosine
  source 1..21: mol_type = other RNA
tgctgtggttatacctactaa

SEQ ID NO: 368 - RNA, 21 nt, synthetic construct
  modified_base 1: mod_base = gm
  modified_base 1^2: mod_base = OTHER; note = phosphorothioate linkage
  modified_base 2: mod_base = cm
  modified_base 3: mod_base = OTHER; note = 2'-O-methyladenosine
  modified_base 4: mod_base = OTHER; note = 2'-O-methyladenosine
  modified_base 5: mod_base = um
  modified_base 6: mod_base = cm
  modified_base 7: mod_base = OTHER; note = 2'-fluorouridine
  modified_base 8: mod_base = um
  modified_base 9: mod_base = OTHER; note = 2'-fluoroadenosine
  modified_base 10: mod_base = OTHER; note = 2'-O-methyladenosine
  modified_base 11: mod_base = OTHER; note = 2'-fluoroguanosine
  modified_base 12: mod_base = OTHER; note = 2'-O-methyladenosine
  modified_base 13: mod_base = cm
  modified_base 14: mod_base = OTHER; note = 2'-O-methyladenosine
  modified_base 15: mod_base = cm
  modified_base 16: mod_base = um
  modified_base 17: mod_base = um
  modified_base 18: mod_base = cm
  modified_base 19: mod_base = um
  modified_base 20: mod_base = um
  modified_base 21: mod_base = um
  source 1..21: mol_type = other RNA
gcaatcttaagacacttcttt

SEQ ID NO: 369 - RNA, 21 nt, synthetic construct
  modified_base 1: mod_base = gm
  modified_base 1^2: mod_base = OTHER; note = phosphorothioate linkage
  modified_base 2: mod_base = cm
  modified_base 3: mod_base = um
  modified_base 4: mod_base = gm
  modified_base 5: mod_base = OTHER; note = 2'-O-methyladenosine
  modified_base 6: mod_base = OTHER; note = 2'-O-methyladenosine
  modified_base 7: mod_base = OTHER; note = 2'-fluorouridine
  modified_base 8: mod_base = OTHER; note = 2'-O-methyladenosine
  modified_base 9: mod_base = OTHER; note = 2'-fluoroadenosine
  modified_base 10: mod_base = gm
  modified_base 11: mod_base = OTHER; note = 2'-fluorocytidine
  modified_base 12: mod_base = OTHER; note = 2'-O-methyladenosine
  modified_base 13: mod_base = um
  modified_base 14: mod_base = OTHER; note = 2'-O-methyladenosine
  modified_base 15: mod_base = um
  modified_base 16: mod_base = um
  modified_base 17: mod_base = gm
  modified_base 18: mod_base = OTHER; note = 2'-O-methyladenosine
  modified_base 19: mod_base = cm
  modified_base 20: mod_base = OTHER; note = 2'-O-methylinosine
  modified_base 21: mod_base = OTHER; note = 2'-O-methyladenosine
  source 1..21: mol_type = other RNA
gctgaataagcatattgacna

SEQ ID NO: 370 - RNA, 21 nt, synthetic construct
  modified_base 1: mod_base = gm
  modified_base 2: mod_base = cm
  modified_base 3: mod_base = um
  modified_base 4: mod_base = um
  modified_base 5: mod_base = cm
  modified_base 6: mod_base = um
  modified_base 7: mod_base = um
  modified_base 8: mod_base = OTHER; note = 2'-O-methyladenosine
  modified_base 9: mod_base = OTHER; note = 2'-fluoroadenosine
  modified_base 10: mod_base = OTHER; note = 2'-fluoroguanosine
  modified_base 11: mod_base = OTHER; note = 2'-fluoroadenosine
  modified_base 12: mod_base = gm
  modified_base 13: mod_base = um
  modified_base 14: mod_base = gm
  modified_base 15: mod_base = cm
  modified_base 16: mod_base = um
  modified_base 17: mod_base = um
  modified_base 18: mod_base = OTHER; note = 2'-O-methyladenosine
  modified_base 19: mod_base = um
  modified_base 20: mod_base = gm
  modified_base 21: mod_base = OTHER; note = 2'-O-methyladenosine
  source 1..21: mol_type = other RNA
gcttcttaagagtgcttatga

SEQ ID NO: 371 - RNA, 21 nt, synthetic construct
  modified_base 1: mod_base = cm
  modified_base 2: mod_base = um
  modified_base 3: mod_base = um
  modified_base 4: mod_base = cm
  modified_base 5: mod_base = um
  modified_base 6: mod_base = um
  modified_base 7: mod_base = OTHER; note = 2'-O-methyladenosine
  modified_base 8: mod_base = OTHER; note = 2'-O-methyladenosine
  modified_base 9: mod_base = OTHER; note = 2'-fluoroguanosine
  modified_base 10: mod_base = OTHER; note = 2'-fluoroadenosine
  modified_base 11: mod_base = OTHER; note = 2'-fluoroguanosine
  modified_base 12: mod_base = um
  modified_base 13: mod_base = gm
  modified_base 14: mod_base = cm
  modified_base 15: mod_base = um
  modified_base 16: mod_base = um
  modified_base 17: mod_base = OTHER; note = 2'-O-methyladenosine
  modified_base 18: mod_base = um
  modified_base 19: mod_base = gm
  modified_base 20: mod_base = OTHER; note = 2'-O-methyladenosine
  modified_base 21: mod_base = OTHER; note = 2'-O-methyladenosine
  source 1..21: mol_type = other RNA
cttcttaagagtgcttatgaa

SEQ ID NO: 372 - RNA, 21 nt, synthetic construct
  modified_base 1: mod_base = cm
  modified_base 2: mod_base = um
  modified_base 3: mod_base = um
  modified_base 4: mod_base = OTHER; note = 2'-O-methyladenosine
  modified_base 5: mod_base = gm
  modified_base 6: mod_base = OTHER; note = 2'-O-methyladenosine
  modified_base 7: mod_base = cm
  modified_base 8: mod_base = OTHER; note = 2'-O-methyladenosine
  modified_base 9: mod_base = OTHER; note = 2'-fluoroadenosine
  modified_base 10: mod_base = OTHER; note = 2'-fluorouridine
  modified_base 11: mod_base = OTHER; note = 2'-fluoroguanosine
  modified_base 12: mod_base = um
  modified_base 13: mod_base = cm
  modified_base 14: mod_base = um
  modified_base 15: mod_base = um
  modified_base 16: mod_base = OTHER; note = 2'-O-methyladenosine
  modified_base 17: mod_base = um
  modified_base 18: mod_base = cm
  modified_base 19: mod_base = um
  modified_base 20: mod_base = OTHER; note = 2'-O-methyladenosine
  modified_base 21: mod_base = OTHER; note = 2'-O-methyladenosine
  source 1..21: mol_type = other RNA
cttagacaatgtcttatctaa

SEQ ID NO: 373 - RNA, 21 nt, synthetic construct
  modified_base 1: mod_base = gm
  modified_base 2: mod_base = cm
  modified_base 3: mod_base = OTHER; note = 2'-O-methyladenosine
  modified_base 4: mod_base = cm
  modified_base 5: mod_base = cm
  modified_base 6: mod_base = um
  modified_base 7: mod_base = um
  modified_base 8: mod_base = um
  modified_base 9: mod_base = OTHER; note = 2'-fluoroguanosine
  modified_base 10: mod_base = OTHER; note = 2'-fluoroadenosine
  modified_base 11: mod_base = OTHER; note = 2'-fluorocytidine
  modified_base 12: mod_base = OTHER; note = 2'-O-methyladenosine
  modified_base 13: mod_base = OTHER; note = 2'-O-methyladenosine
  modified_base 14: mod_base = um
  modified_base 15: mod_base = cm
  modified_base 16: mod_base = um
  modified_base 17: mod_base = um
  modified_base 18: mod_base = OTHER; note = 2'-O-methyladenosine
  modified_base 19: mod_base = OTHER; note = 2'-O-methyladenosine
  modified_base 20: mod_base = gm
  modified_base 21: mod_base = OTHER; note = 2'-O-methyladenosine
  source 1..21: mol_type = other RNA
gcacctttgacaatcttaaga

SEQ ID NO: 374 - RNA, 21 nt, synthetic construct
  modified_base 1: mod_base = gm
  modified_base 2: mod_base = gm
  modified_base 3: mod_base = OTHER; note = 2'-O-methyladenosine
  modified_base 4: mod_base = OTHER; note = 2'-O-methyladenosine
  modified_base 5: mod_base = gm
  modified_base 6: mod_base = um
  modified_base 7: mod_base = OTHER; note = 2'-O-methyladenosine
  modified_base 8: mod_base = gm
  modified_base 9: mod_base = OTHER; note = 2'-fluorouridine
  modified_base 10: mod_base = OTHER; note = 2'-fluoroguanosine
  modified_base 11: mod_base = OTHER; note = 2'-fluoroguanosine
  modified_base 12: mod_base = OTHER; note = 2'-O-methyladenosine
  modified_base 13: mod_base = OTHER; note = 2'-O-methyladenosine
  modified_base 14: mod_base = OTHER; note = 2'-O-methyladenosine
  modified_base 15: mod_base = OTHER; note = 2'-O-methyladenosine
  modified_base 16: mod_base = um
  modified_base 17: mod_base = cm
  modified_base 18: mod_base = cm
  modified_base 19: mod_base = um
  modified_base 20: mod_base = OTHER; note = 2'-O-methyladenosine
  modified_base 21: mod_base = OTHER; note = 2'-O-methyladenosine
  source 1..21: mol_type = other RNA
ggaagtagtggaaaatcctaa

SEQ ID NO: 375 - RNA, 21 nt, synthetic construct
  modified_base 1: mod_base = gm
  modified_base 1^2: mod_base = OTHER; note = phosphorothioate linkage
  modified_base 2: mod_base = gm
  modified_base 2^3: mod_base = OTHER; note = phosphorothioate linkage
  modified_base 3: mod_base = OTHER; note = 2'-O-methyladenosine
  modified_base 4: mod_base = OTHER; note = 2'-O-methyladenosine
  modified_base 5: mod_base = gm
  modified_base 6: mod_base = um
  modified_base 7: mod_base = OTHER; note = 2'-O-methyladenosine
  modified_base 8: mod_base = gm
  modified_base 9: mod_base = OTHER; note = 2'-fluorouridine
  modified_base 10: mod_base = OTHER; note = 2'-fluoroguanosine
  modified_base 11: mod_base = OTHER; note = 2'-fluoroguanosine
  modified_base 12: mod_base = OTHER; note = 2'-O-methyladenosine
  modified_base 13: mod_base = OTHER; note = 2'-O-methyladenosine
  modified_base 14: mod_base = OTHER; note = 2'-O-methyladenosine
  modified_base 15: mod_base = OTHER; note = 2'-O-methyladenosine
  modified_base 16: mod_base = um
  modified_base 17: mod_base = cm
  modified_base 18: mod_base = cm
  modified_base 19: mod_base = um
  modified_base 20: mod_base = OTHER; note = 2'-O-methyladenosine
  modified_base 20^21: mod_base = OTHER; note = phosphorothioate linkage
  modified_base 21: mod_base = OTHER; note = 2'-O-methyladenosine
  source 1..21: mol_type = other RNA
ggaagtagtggaaaatcctaa

SEQ ID NO: 376 - RNA, 21 nt, synthetic construct
  modified_base 1: mod_base = gm
  modified_base 1^2: mod_base = OTHER; note = phosphorothioate linkage
  modified_base 2: mod_base = um
  modified_base 3: mod_base = cm
  modified_base 4: mod_base = cm
  modified_base 5: mod_base = OTHER; note = 2'-O-methyladenosine
  modified_base 6: mod_base = OTHER; note = 2'-O-methyladenosine
  modified_base 7: mod_base = gm
  modified_base 8: mod_base = OTHER; note = 2'-O-methyladenosine
  modified_base 9: mod_base = OTHER; note = 2'-fluorouridine
  modified_base 10: mod_base = OTHER; note = 2'-fluoroguanosine
  modified_base 11: mod_base = OTHER; note = 2'-fluoroguanosine
  modified_base 12: mod_base = um
  modified_base 13: mod_base = OTHER; note = 2'-O-methyladenosine
  modified_base 14: mod_base = um
  modified_base 15: mod_base = um
  modified_base 16: mod_base = um
  modified_base 17: mod_base = cm
  modified_base 18: mod_base = um
  modified_base 19: mod_base = OTHER; note = 2'-O-methyladenosine
  modified_base 20: mod_base = cm
  modified_base 21: mod_base = OTHER; note = 2'-O-methyladenosine
  source 1..21: mol_type = other RNA
gtccaagatggtatttctaca

SEQ ID NO: 377 - RNA, 21 nt, synthetic construct
  modified_base 1: mod_base = cm
  modified_base 2: mod_base = OTHER; note = 2'-O-methyladenosine
  modified_base 3: mod_base = um
  modified_base 4: mod_base = OTHER; note = 2'-O-methyladenosine
  modified_base 5: mod_base = cm
  modified_base 6: mod_base = OTHER; note = 2'-O-methyladenosine
  modified_base 7: mod_base = OTHER; note = 2'-O-methyladenosine
  modified_base 8: mod_base = um
  modified_base 9: mod_base = OTHER; note = 2'-fluoroguanosine
  modified_base 10: mod_base = OTHER; note = 2'-fluorocytidine
  modified_base 11: mod_base = OTHER; note = 2'-fluorouridine
  modified_base 12: mod_base = OTHER; note = 2'-O-methyladenosine
  modified_base 13: mod_base = gm
  modified_base 14: mod_base = um
  modified_base 15: mod_base = um
  modified_base 16: mod_base = OTHER; note = 2'-O-methyladenosine
  modified_base 17: mod_base = OTHER; note = 2'-O-methyladenosine
  modified_base 18: mod_base = OTHER; note = 2'-O-methyladenosine
  modified_base 19: mod_base = cm
  modified_base 20: mod_base = OTHER; note = 2'-O-methyladenosine
  modified_base 21: mod_base = OTHER; note = 2'-O-methyladenosine
  source 1..21: mol_type = other RNA
catacaatgctagttaaacaa

SEQ ID NO: 378 - RNA, 21 nt, synthetic construct
  modified_base 1: mod_base = cm
  modified_base 2: mod_base = OTHER; note = 2'-O-methyladenosine
  modified_base 3: mod_base = OTHER; note = 2'-O-methyladenosine
  modified_base 4: mod_base = gm
  modified_base 5: mod_base = OTHER; note = 2'-O-methyladenosine
  modified_base 6: mod_base = um
  modified_base 7: mod_base = gm
  modified_base 8: mod_base = gm
  modified_base 9: mod_base = OTHER; note = 2'-fluorouridine
  modified_base 10: mod_base = OTHER; note = 2'-fluoroadenosine
  modified_base 11: mod_base = OTHER; note = 2'-fluorouridine
  modified_base 12: mod_base = um
  modified_base 13: mod_base = um
  modified_base 14: mod_base = cm
  modified_base 15: mod_base = um
  modified_base 16: mod_base = OTHER; note = 2'-O-methyladenosine
  modified_base 17: mod_base = cm
  modified_base 18: mod_base = um
  modified_base 19: mod_base = OTHER; note = 2'-O-methyladenosine
  modified_base 20: mod_base = cm
  modified_base 21: mod_base = OTHER; note = 2'-O-methyladenosine
  source 1..21: mol_type = other RNA
caagatggtatttctactaca

SEQ ID NO: 379 - RNA, 21 nt, synthetic construct
  modified_base 1: mod_base = gm
  modified_base 2: mod_base = gm
  modified_base 3: mod_base = OTHER; note = 2'-O-methyladenosine
  modified_base 4: mod_base = cm
  modified_base 5: mod_base = OTHER; note = 2'-O-methyladenosine
  modified_base 6: mod_base = OTHER; note = 2'-O-methyladenosine
  modified_base 7: mod_base = gm
  modified_base 8: mod_base = gm
  modified_base 9: mod_base = OTHER; note = 2'-fluoroadenosine
  modified_base 10: mod_base = OTHER; note = 2'-fluoroadenosine
  modified_base 11: mod_base = OTHER; note = 2'-fluorocytidine
  modified_base 12: mod_base = um
  modified_base 13: mod_base = gm
  modified_base 14: mod_base = OTHER; note = 2'-O-methyladenosine
  modified_base 15: mod_base = um
  modified_base 16: mod_base = um
  modified_base 17: mod_base = OTHER; note = 2'-O-methyladenosine
  modified_base 18: mod_base = cm
  modified_base 19: mod_base = OTHER; note = 2'-O-methyladenosine
  modified_base 20: mod_base = OTHER; note = 2'-O-methyladenosine
  modified_base 21: mod_base = OTHER; note = 2'-O-methyladenosine
  source 1..21: mol_type = other RNA
ggacaaggaactgattacaaa

SEQ ID NO: 380 - RNA, 21 nt, synthetic construct
  modified_base 1: mod_base = cm
  modified_base 2: mod_base = cm
  modified_base 3: mod_base = OTHER; note = 2'-O-methyladenosine
  modified_base 4: mod_base = cm
  modified_base 5: mod_base = um
  modified_base 6: mod_base = OTHER; note = 2'-O-methyladenosine
  modified_base 7: mod_base = OTHER; note = 2'-O-methyladenosine
  modified_base 8: mod_base = OTHER; note = 2'-O-methyladenosine
  modified_base 9: mod_base = OTHER; note = 2'-fluoroguanosine
  modified_base 10: mod_base = OTHER; note = 2'-fluorocytidine
  modified_base 11: mod_base = OTHER; note = 2'-fluoroadenosine
  modified_base 12: mod_base = um
  modified_base 13: mod_base = OTHER; note = 2'-O-methyladenosine
  modified_base 14: mod_base = cm
  modified_base 15: mod_base = OTHER; note = 2'-O-methyladenosine
  modified_base 16: mod_base = OTHER; note = 2'-O-methyladenosine
  modified_base 17: mod_base = um
  modified_base 18: mod_base = gm
  modified_base 19: mod_base = um
  modified_base 20: mod_base = OTHER; note = 2'-O-methyladenosine
  modified_base 21: mod_base = OTHER; note = 2'-O-methyladenosine
  source 1..21: mol_type = other RNA
ccactaaagcatacaatgtaa

SEQ ID NO: 381 - RNA, 21 nt, synthetic construct
  modified_base 1: mod_base = gm
  modified_base 2: mod_base = um
  modified_base 3: mod_base = cm
  modified_base 4: mod_base = cm
  modified_base 5: mod_base = OTHER; note = 2'-O-methyladenosine
  modified_base 6: mod_base = OTHER; note = 2'-O-methyladenosine
  modified_base 7: mod_base = gm
  modified_base 8: mod_base = OTHER; note = 2'-O-methyladenosine
  modified_base 9: mod_base = OTHER; note = 2'-fluorouridine
  modified_base 10: mod_base = OTHER; note = 2'-fluoroguanosine
  modified_base 11: mod_base = OTHER; note = 2'-fluoroguanosine
  modified_base 12: mod_base = um
  modified_base 13: mod_base = OTHER; note = 2'-O-methyladenosine
  modified_base 14: mod_base = um
  modified_base 15: mod_base = um
  modified_base 16: mod_base = um
  modified_base 17: mod_base = cm
  modified_base 18: mod_base = um
  modified_base 19: mod_base = OTHER; note = 2'-O-methyladenosine
  modified_base 20: mod_base = cm
  modified_base 21: mod_base = um
  source 1..21: mol_type = other RNA
gtccaagatggtatttctact

SEQ ID NO: 382 - RNA, 21 nt, synthetic construct
  modified_base 1: mod_base = gm
  modified_base 2: mod_base = gm
  modified_base 3: mod_base = OTHER; note = 2'-O-methyladenosine
  modified_base 4: mod_base = OTHER; note = 2'-O-methyladenosine
  modified_base 5: mod_base = gm
  modified_base 6: mod_base = um
  modified_base 7: mod_base = OTHER; note = 2'-O-methyladenosine
  modified_base 8: mod_base = gm
  modified_base 9: mod_base = OTHER; note = 2'-fluorouridine
  modified_base 10: mod_base = gm
  modified_base 11: mod_base = OTHER; note = 2'-fluoroguanosine
  modified_base 12: mod_base = OTHER; note = 2'-O-methyladenosine
  modified_base 13: mod_base = OTHER; note = 2'-fluoroadenosine
  modified_base 14: mod_base = OTHER; note = 2'-O-methyladenosine
  modified_base 15: mod_base = OTHER; note = 2'-O-methyladenosine
  modified_base 16: mod_base = um
  modified_base 17: mod_base = cm
  modified_base 18: mod_base = cm
  modified_base 19: mod_base = um
  modified_base 20: mod_base = OTHER; note = 2'-O-methyladenosine
  modified_base 21: mod_base = OTHER; note = 2'-O-methyladenosine
  source 1..21: mol_type = other RNA
ggaagtagtggaaaatcctaa

SEQ ID NO: 383 - RNA, 21 nt, synthetic construct
  modified_base 1: mod_base = cm
  modified_base 2: mod_base = gm
  modified_base 3: mod_base = OTHER; note = 2'-O-methyladenosine
  modified_base 4: mod_base = OTHER; note = 2'-O-methyladenosine
  modified_base 5: mod_base = gm
  modified_base 6: mod_base = um
  modified_base 7: mod_base = OTHER; note = 2'-O-methyladenosine
  modified_base 8: mod_base = gm
  modified_base 9: mod_base = OTHER; note = 2'-fluorouridine
  modified_base 10: mod_base = gm
  modified_base 11: mod_base = OTHER; note = 2'-fluoroguanosine
  modified_base 12: mod_base = OTHER; note = 2'-O-methyladenosine
  modified_base 13: mod_base = OTHER; note = 2'-fluoroadenosine
  modified_base 14: mod_base = OTHER; note = 2'-O-methyladenosine
  modified_base 15: mod_base = OTHER; note = 2'-O-methyladenosine
  modified_base 16: mod_base = um
  modified_base 17: mod_base = cm
  modified_base 18: mod_base = cm
  modified_base 19: mod_base = um
  modified_base 20: mod_base = OTHER; note = 2'-O-methyladenosine
  modified_base 21: mod_base = OTHER; note = 2'-O-methyladenosine
  source 1..21: mol_type = other RNA
cgaagtagtggaaaatcctaa

SEQ ID NO: 384 - RNA, 21 nt, synthetic construct
  modified_base 1: mod_base = cm
  modified_base 2: mod_base = OTHER; note = 2'-O-methyladenosine
  modified_base 3: mod_base = um
  modified_base 4: mod_base = OTHER; note = 2'-O-methyladenosine
  modified_base 5: mod_base = cm
  modified_base 6: mod_base = OTHER; note = 2'-O-methyladenosine
  modified_base 7: mod_base = OTHER; note = 2'-O-methyladenosine
  modified_base 8: mod_base = um
  modified_base 9: mod_base = OTHER; note = 2'-fluoroguanosine
  modified_base 10: mod_base = cm
  modified_base 11: mod_base = OTHER; note = 2'-fluorouridine
  modified_base 12: mod_base = OTHER; note = 2'-O-methyladenosine
  modified_base 13: mod_base = OTHER; note = 2'-fluoroguanosine
  modified_base 14: mod_base = um
  modified_base 15: mod_base = um
  modified_base 16: mod_base = OTHER; note = 2'-O-methyladenosine
  modified_base 17: mod_base = OTHER; note = 2'-O-methyladenosine
  modified_base 18: mod_base = OTHER; note = 2'-O-methyladenosine
  modified_base 19: mod_base = cm
  modified_base 20: mod_base = OTHER; note = 2'-O-methyladenosine
  modified_base 21: mod_base = OTHER; note = 2'-O-methyladenosine
  source 1..21: mol_type = other RNA
catacaatgctagttaaacaa

SEQ ID NO: 385 - RNA, 21 nt, synthetic construct
  modified_base 1: mod_base = cm
  modified_base 2: mod_base = gm
  modified_base 3: mod_base = um
  modified_base 4: mod_base = OTHER; note = 2'-O-methyladenosine
  modified_base 5: mod_base = cm
  modified_base 6: mod_base = OTHER; note = 2'-O-methyladenosine
  modified_base 7: mod_base = OTHER; note = 2'-O-methyladenosine
  modified_base 8: mod_base = um
  modified_base 9: mod_base = OTHER; note = 2'-fluoroguanosine
  modified_base 10: mod_base = cm
  modified_base 11: mod_base = OTHER; note = 2'-fluorouridine
  modified_base 12: mod_base = OTHER; note = 2'-O-methyladenosine
  modified_base 13: mod_base = OTHER; note = 2'-fluoroguanosine
  modified_base 14: mod_base = um
  modified_base 15: mod_base = um
  modified_base 16: mod_base = OTHER; note = 2'-O-methyladenosine
  modified_base 17: mod_base = OTHER; note = 2'-O-methyladenosine
  modified_base 18: mod_base = OTHER; note = 2'-O-methyladenosine
  modified_base 19: mod_base = cm
  modified_base 20: mod_base = OTHER; note = 2'-O-methyladenosine
  modified_base 21: mod_base = OTHER; note = 2'-O-methyladenosine
  source 1..21: mol_type = other RNA
cgtacaatgctagttaaacaa

SEQ ID NO: 386 - RNA, 21 nt, synthetic construct
  modified_base 1: mod_base = gm
  modified_base 2: mod_base = um
  modified_base 3: mod_base = cm
  modified_base 4: mod_base = cm
  modified_base 5: mod_base = OTHER; note = 2'-O-methyladenosine
  modified_base 6: mod_base = OTHER; note = 2'-O-methyladenosine
  modified_base 7: mod_base = gm
  modified_base 8: mod_base = OTHER; note = 2'-O-methyladenosine
  modified_base 9: mod_base = OTHER; note = 2'-fluorouridine
  modified_base 10: mod_base = gm
  modified_base 11: mod_base = OTHER; note = 2'-fluoroguanosine
  modified_base 12: mod_base = um
  modified_base 13: mod_base = OTHER; note = 2'-fluoroadenosine
  modified_base 14: mod_base = um
  modified_base 15: mod_base = um
  modified_base 16: mod_base = um
  modified_base 17: mod_base = cm
  modified_base 18: mod_base = um
  modified_base 19: mod_base = OTHER; note = 2'-O-methyladenosine
  modified_base 20: mod_base = cm
  modified_base 21: mod_base = um
  source 1..21: mol_type = other RNA
gtccaagatggtatttctact

SEQ ID NO: 387 - RNA, 21 nt, synthetic construct
  modified_base 1: mod_base = gm
  modified_base 2: mod_base = um
  modified_base 3: mod_base = cm
  modified_base 4: mod_base = cm
  modified_base 5: mod_base = OTHER; note = 2'-O-methyladenosine
  modified_base 6: mod_base = OTHER; note = 2'-O-methyladenosine
  modified_base 7: mod_base = gm
  modified_base 8: mod_base = OTHER; note = 2'-O-methyladenosine
  modified_base 9: mod_base = OTHER; note = 2'-fluorouridine
  modified_base 10: mod_base = gm
  modified_base 11: mod_base = OTHER; note = 2'-fluoroguanosine
  modified_base 12: mod_base = um
  modified_base 13: mod_base = OTHER; note = 2'-fluoroadenosine
  modified_base 14: mod_base = um
  modified_base 15: mod_base = um
  modified_base 16: mod_base = um
  modified_base 17: mod_base = cm
  modified_base 18: mod_base = um
  modified_base 19: mod_base = OTHER; note = 2'-O-methyladenosine
  modified_base 20: mod_base = cm
  modified_base 21: mod_base = OTHER; note = 2'-O-methyladenosine
  source 1..21: mol_type = other RNA
gtccaagatggtatttctaca

SEQ ID NO: 388 - RNA, 21 nt, synthetic construct
  modified_base 1: mod_base = gm
  modified_base 2: mod_base = gm
  modified_base 3: mod_base = OTHER; note = 2'-O-methyladenosine
  modified_base 4: mod_base = cm
  modified_base 5: mod_base = OTHER; note = 2'-O-methyladenosine
  modified_base 6: mod_base = OTHER; note = 2'-O-methyladenosine
  modified_base 7: mod_base = gm
  modified_base 8: mod_base = gm
  modified_base 9: mod_base = OTHER; note = 2'-fluoroadenosine
  modified_base 10: mod_base = OTHER; note = 2'-O-methyladenosine
  modified_base 11: mod_base = OTHER; note = 2'-fluorocytidine
  modified_base 12: mod_base = um
  modified_base 13: mod_base = OTHER; note = 2'-fluoroguanosine
  modified_base 14: mod_base = OTHER; note = 2'-O-methyladenosine
  modified_base 15: mod_base = um
  modified_base 16: mod_base = um
  modified_base 17: mod_base = OTHER; note = 2'-O-methyladenosine
  modified_base 18: mod_base = cm
  modified_base 19: mod_base = OTHER; note = 2'-O-methyladenosine
  modified_base 20: mod_base = OTHER; note = 2'-O-methyladenosine
  modified_base 21: mod_base = OTHER; note = 2'-O-methyladenosine
  source 1..21: mol_type = other RNA
ggacaaggaactgattacaaa

SEQ ID NO: 389 - RNA, 21 nt, synthetic construct
  modified_base 1: mod_base = cm
  modified_base 2: mod_base = gm
  modified_base 3: mod_base = OTHER; note = 2'-O-methyladenosine
  modified_base 4: mod_base = cm
  modified_base 5: mod_base = OTHER; note = 2'-O-methyladenosine
  modified_base 6: mod_base = OTHER; note = 2'-O-methyladenosine
  modified_base 7: mod_base = gm
  modified_base 8: mod_base = gm
  modified_base 9: mod_base = OTHER; note = 2'-fluoroadenosine
  modified_base 10: mod_base = OTHER; note = 2'-O-methyladenosine
  modified_base 11: mod_base = OTHER; note = 2'-fluorocytidine
  modified_base 12: mod_base = um
  modified_base 13: mod_base = OTHER; note = 2'-fluoroguanosine
  modified_base 14: mod_base = OTHER; note = 2'-O-methyladenosine
  modified_base 15: mod_base = um
  modified_base 16: mod_base = um
  modified_base 17: mod_base = OTHER; note = 2'-O-methyladenosine
  modified_base 18: mod_base = cm
  modified_base 19: mod_base = OTHER; note = 2'-O-methyladenosine
  modified_base 20: mod_base = OTHER; note = 2'-O-methyladenosine
  modified_base 21: mod_base = OTHER; note = 2'-O-methyladenosine
  source 1..21: mol_type = other RNA
cgacaaggaactgattacaaa

SEQ ID NO: 390 - RNA, 21 nt, synthetic construct
  modified_base 1: mod_base = cm
  modified_base 2: mod_base = OTHER; note = 2'-O-methyladenosine
  modified_base 3: mod_base = um
  modified_base 4: mod_base = OTHER; note = 2'-O-methyladenosine
  modified_base 5: mod_base = OTHER; note = 2'-O-methyladenosine
  modified_base 6: mod_base = um
  modified_base 7: mod_base = cm
  modified_base 8: mod_base = OTHER; note = 2'-O-methyladenosine
  modified_base 9: mod_base = OTHER; note = 2'-fluoroguanosine
  modified_base 10: mod_base = OTHER; note = 2'-fluoroguanosine
  modified_base 11: mod_base = OTHER; note = 2'-fluoroadenosine
  modified_base 12: mod_base = um
  modified_base 13: mod_base = gm
  modified_base 14: mod_base = um
  modified_base 15: mod_base = OTHER; note = 2'-O-methyladenosine
  modified_base 16: mod_base = OTHER; note = 2'-O-methyladenosine
  modified_base 17: mod_base = OTHER; note = 2'-O-methyladenosine
  modified_base 18: mod_base = cm
  modified_base 19: mod_base = um
  modified_base 20: mod_base = um
  modified_base 21: mod_base = OTHER; note = 2'-O-methyladenosine
  source 1..21: mol_type = other RNA
cataatcaggatgtaaactta

SEQ ID NO: 391 - RNA, 21 nt, synthetic construct
  modified_base 1: mod_base = cm
  modified_base 2: mod_base = OTHER; note = 2'-O-methyladenosine
  modified_base 3: mod_base = um
  modified_base 4: mod_base = OTHER; note = 2'-O-methyladenosine
  modified_base 5: mod_base = OTHER; note = 2'-O-methyladenosine
  modified_base 6: mod_base = um
  modified_base 7: mod_base = cm
  modified_base 8: mod_base = OTHER; note = 2'-O-methyladenosine
  modified_base 9: mod_base = OTHER; note = 2'-fluoroguanosine
  modified_base 10: mod_base = gm
  modified_base 11: mod_base = OTHER; note = 2'-fluoroadenosine
  modified_base 12: mod_base = um
  modified_base 13: mod_base = OTHER; note = 2'-fluoroguanosine
  modified_base 14: mod_base = um
  modified_base 15: mod_base = OTHER; note = 2'-O-methyladenosine
  modified_base 16: mod_base = OTHER; note = 2'-O-methyladenosine
  modified_base 17: mod_base = OTHER; note = 2'-O-methyladenosine
  modified_base 18: mod_base = cm
  modified_base 19: mod_base = um
  modified_base 20: mod_base = um
  modified_base 21: mod_base = OTHER; note = 2'-O-methyladenosine
  source 1..21: mol_type = other RNA
cataatcaggatgtaaactta

SEQ ID NO: 392 - RNA, 21 nt, synthetic construct
  modified_base 1: mod_base = cm
  modified_base 2: mod_base = gm
  modified_base 3: mod_base = um
  modified_base 4: mod_base = OTHER; note = 2'-O-methyladenosine
  modified_base 5: mod_base = OTHER; note = 2'-O-methyladenosine
  modified_base 6: mod_base = um
  modified_base 7: mod_base = cm
  modified_base 8: mod_base = OTHER; note = 2'-O-methyladenosine
  modified_base 9: mod_base = OTHER; note = 2'-fluoroguanosine
  modified_base 10: mod_base = gm
  modified_base 11: mod_base = OTHER; note = 2'-fluoroadenosine
  modified_base 12: mod_base = um
  modified_base 13: mod_base = OTHER; note = 2'-fluoroguanosine
  modified_base 14: mod_base = um
  modified_base 15: mod_base = OTHER; note = 2'-O-methyladenosine
  modified_base 16: mod_base = OTHER; note = 2'-O-methyladenosine
  modified_base 17: mod_base = OTHER; note = 2'-O-methyladenosine
  modified_base 18: mod_base = cm
  modified_base 19: mod_base = um
  modified_base 20: mod_base = um
  modified_base 21: mod_base = OTHER; note = 2'-O-methyladenosine
  source 1..21: mol_type = other RNA
cgtaatcaggatgtaaactta

SEQ ID NO: 393 - RNA, 21 nt, synthetic construct
  modified_base 1: mod_base = gm
  modified_base 2: mod_base = gm
  modified_base 3: mod_base = OTHER; note = 2'-O-methyladenosine
  modified_base 4: mod_base = um
  modified_base 5: mod_base = gm
  modified_base 6: mod_base = um
  modified_base 7: mod_base = OTHER; note = 2'-O-methyladenosine
  modified_base 8: mod_base = OTHER; note = 2'-O-methyladenosine
  modified_base 9: mod_base = OTHER; note = 2'-fluoroadenosine
  modified_base 10: mod_base = OTHER; note = 2'-fluorocytidine
  modified_base 11: mod_base = OTHER; note = 2'-fluorouridine
  modified_base 12: mod_base = um
  modified_base 13: mod_base = OTHER; note = 2'-O-methyladenosine
  modified_base 14: mod_base = cm
  modified_base 15: mod_base = OTHER; note = 2'-O-methyladenosine
  modified_base 16: mod_base = um
  modified_base 17: mod_base = OTHER; note = 2'-O-methyladenosine
  modified_base 18: mod_base = gm
  modified_base 19: mod_base = cm
  modified_base 20: mod_base = um
  modified_base 21: mod_base = OTHER; note = 2'-O-methyladenosine
  source 1..21: mol_type = other RNA
ggatgtaaacttacatagcta

SEQ ID NO: 394 - RNA, 21 nt, synthetic construct
  modified_base 1: mod_base = gm
  modified_base 2: mod_base = gm
  modified_base 3: mod_base = OTHER; note = 2'-O-methyladenosine
  modified_base 4: mod_base = um
  modified_base 5: mod_base = gm
  modified_base 6: mod_base = um
  modified_base 7: mod_base = OTHER; note = 2'-O-methyladenosine
  modified_base 8: mod_base = OTHER; note = 2'-O-methyladenosine
  modified_base 9: mod_base = OTHER; note = 2'-fluoroadenosine
  modified_base 10: mod_base = cm
  modified_base 11: mod_base = OTHER; note = 2'-fluorouridine
  modified_base 12: mod_base = um
  modified_base 13: mod_base = OTHER; note = 2'-fluoroadenosine
  modified_base 14: mod_base = cm
  modified_base 15: mod_base = OTHER; note = 2'-O-methyladenosine
  modified_base 16: mod_base = um
  modified_base 17: mod_base = OTHER; note = 2'-O-methyladenosine
  modified_base 18: mod_base = gm
  modified_base 19: mod_base = cm
  modified_base 20: mod_base = um
  modified_base 21: mod_base = OTHER; note = 2'-O-methyladenosine
  source 1..21: mol_type = other RNA
ggatgtaaacttacatagcta

SEQ ID NO: 395 - RNA, 21 nt, synthetic construct
  modified_base 1: mod_base = gm
  modified_base 2: mod_base = cm
  modified_base 3: mod_base = OTHER; note = 2'-O-methyladenosine
  modified_base 4: mod_base = cm
  modified_base 5: mod_base = cm
  modified_base 6: mod_base = um
  modified_base 7: mod_base = um
  modified_base 8: mod_base = um
  modified_base 9: mod_base = OTHER; note = 2'-fluoroguanosine
  modified_base 10: mod_base = OTHER; note = 2'-O-methyladenosine
  modified_base 11: mod_base = OTHER; note = 2'-fluorocytidine
  modified_base 12: mod_base = OTHER; note = 2'-O-methyladenosine
  modified_base 13: mod_base = OTHER; note = 2'-fluoroadenosine
  modified_base 14: mod_base = um
  modified_base 15: mod_base = cm
  modified_base 16: mod_base = um
  modified_base 17: mod_base = um
  modified_base 18: mod_base = OTHER; note = 2'-O-methyladenosine
  modified_base 19: mod_base = OTHER; note = 2'-O-methyladenosine
  modified_base 20: mod_base = gm
  modified_base 21: mod_base = OTHER; note = 2'-O-methyladenosine
  source 1..21: mol_type = other RNA
gcacctttgacaatcttaaga

SEQ ID NO: 396 - RNA, 21 nt, synthetic construct
  modified_base 1: mod_base = um
  modified_base 2: mod_base = gm
  modified_base 3: mod_base = cm
  modified_base 4: mod_base = um
  modified_base 5: mod_base = gm
  modified_base 6: mod_base = um
  modified_base 7: mod_base = gm
  modified_base 8: mod_base = gm
  modified_base 9: mod_base = OTHER; note = 2'-fluorouridine
  modified_base 10: mod_base = OTHER; note = 2'-fluorouridine
  modified_base 11: mod_base = OTHER; note = 2'-fluoroadenosine
  modified_base 12: mod_base = um
  modified_base 13: mod_base = OTHER; note = 2'-O-methyladenosine
  modified_base 14: mod_base = cm
  modified_base 15: mod_base = cm
  modified_base 16: mod_base = um
  modified_base 17: mod_base = OTHER; note = 2'-O-methyladenosine
  modified_base 18: mod_base = cm
  modified_base 19: mod_base = um
  modified_base 20: mod_base = OTHER; note = 2'-O-methyladenosine
  modified_base 21: mod_base = OTHER; note = 2'-O-methyladenosine
  source 1..21: mol_type = other RNA
tgctgtggttatacctactaa

SEQ ID NO: 397 - RNA, 21 nt, synthetic construct
  modified_base 1: mod_base = gm
  modified_base 2: mod_base = OTHER; note = 2'-O-methyladenosine
  modified_base 3: mod_base = cm
  modified_base 4: mod_base = OTHER; note = 2'-O-methyladenosine
  modified_base 5: mod_base = OTHER; note = 2'-O-methyladenosine
  modified_base 6: mod_base = um
  modified_base 7: mod_base = cm
  modified_base 8: mod_base = um
  modified_base 9: mod_base = OTHER; note = 2'-fluorouridine
  modified_base 10: mod_base = OTHER; note = 2'-fluoroadenosine
  modified_base 11: mod_base = OTHER; note = 2'-fluoroadenosine
  modified_base 12: mod_base = gm
  modified_base 13: mod_base = OTHER; note = 2'-O-methyladenosine
  modified_base 14: mod_base = cm
  modified_base 15: mod_base = OTHER; note = 2'-O-methyladenosine
  modified_base 16: mod_base = cm
  modified_base 17: mod_base = um
  modified_base 18: mod_base = um
  modified_base 19: mod_base = cm
  modified_base 20: mod_base = um
  modified_base 21: mod_base = um
  source 1..21: mol_type = other RNA
gacaatcttaagacacttctt

SEQ ID NO: 398 - RNA, 21 nt, synthetic construct
  modified_base 1: mod_base = cm
  modified_base 2: mod_base = OTHER; note = 2'-O-methyladenosine
  modified_base 3: mod_base = um
  modified_base 4: mod_base = gm
  modified_base 5: mod_base = gm
  modified_base 6: mod_base = gm
  modified_base 7: mod_base = cm
  modified_base 8: mod_base = OTHER; note = 2'-O-methyladenosine
  modified_base 9: mod_base = OTHER; note = 2'-fluorocytidine
  modified_base 10: mod_base = OTHER; note = 2'-fluoroadenosine
  modified_base 11: mod_base = OTHER; note = 2'-fluorocytidine
  modified_base 12: mod_base = um
  modified_base 13: mod_base = um
  modified_base 14: mod_base = um
  modified_base 15: mod_base = cm
  modified_base 16: mod_base = um
  modified_base 17: mod_base = um
  modified_base 18: mod_base = OTHER; note = 2'-O-methyladenosine
  modified_base 19: mod_base = um
  modified_base 20: mod_base = gm
  modified_base 21: mod_base = OTHER; note = 2'-O-methyladenosine
  source 1..21: mol_type = other RNA
catgggcacactttcttatga

SEQ ID NO: 399 - RNA, 21 nt, synthetic construct
  modified_base 1: mod_base = OTHER; note = 2'-O-methyladenosine
  modified_base 2: mod_base = cm
  modified_base 3: mod_base = OTHER; note = 2'-O-methyladenosine
  modified_base 4: mod_base = gm
  modified_base 5: mod_base = OTHER; note = 2'-O-methyladenosine
  modified_base 6: mod_base = OTHER; note = 2'-O-methyladenosine
  modified_base 7: mod_base = OTHER; note = 2'-O-methyladenosine
  modified_base 8: mod_base = um
  modified_base 9: mod_base = OTHER; note = 2'-fluorouridine
  modified_base 10: mod_base = OTHER; note = 2'-fluoroguanosine
  modified_base 11: mod_base = OTHER; note = 2'-fluoroadenosine
  modified_base 12: mod_base = cm
  modified_base 13: mod_base = cm
  modified_base 14: mod_base = cm
  modified_base 15: mod_base = um
  modified_base 16: mod_base = OTHER; note = 2'-O-methyladenosine
  modified_base 17: mod_base = OTHER; note = 2'-O-methyladenosine
  modified_base 18: mod_base = gm
  modified_base 19: mod_base = um
  modified_base 20: mod_base = um
  modified_base 21: mod_base = OTHER; note = 2'-O-methyladenosine
  source 1..21: mol_type = other RNA
acagaaattgaccctaagtta

SEQ ID NO: 400 - RNA, 21 nt, synthetic construct
  modified_base 1: mod_base = gm
  modified_base 2: mod_base = OTHER; note = 2'-O-methyladenosine
  modified_base 3: mod_base = um
  modified_base 4: mod_base = gm
  modified_base 5: mod_base = cm
  modified_base 6: mod_base = um
  modified_base 7: mod_base = um
  modified_base 8: mod_base = OTHER; note = 2'-O-methyladenosine
  modified_base 9: mod_base = OTHER; note = 2'-fluorocytidine
  modified_base 10: mod_base = OTHER; note = 2'-fluoroguanosine
  modified_base 11: mod_base = OTHER; note = 2'-fluorouridine
  modified_base 12: mod_base = um
  modified_base 13: mod_base = OTHER; note = 2'-O-methyladenosine
  modified_base 14: mod_base = OTHER; note = 2'-O-methyladenosine
  modified_base 15: mod_base = um
  modified_base 16: mod_base = OTHER; note = 2'-O-methyladenosine
  modified_base 17: mod_base = cm
  modified_base 18: mod_base = gm
  modified_base 19: mod_base = um
  modified_base 20: mod_base = um
  modified_base 21: mod_base = um
  source 1..21: mol_type = other RNA
gatgcttacgttaatacgttt

SEQ ID NO: 401 - RNA, 21 nt, synthetic construct
  modified_base 1: mod_base = cm
  modified_base 2: mod_base = OTHER; note = 2'-O-methyladenosine
  modified_base 3: mod_base = OTHER; note = 2'-O-methyladenosine
  modified_base 4: mod_base = gm
  modified_base 5: mod_base = cm
  modified_base 6: mod_base = um
  modified_base 7: mod_base = OTHER; note = 2'-O-methyladenosine
  modified_base 8: mod_base = um
  modified_base 9: mod_base = OTHER; note = 2'-fluoroguanosine
  modified_base 10: mod_base = OTHER; note = 2'-fluoroadenosine
  modified_base 11: mod_base = OTHER; note = 2'-fluorocytidine
  modified_base 12: mod_base = cm
  modified_base 13: mod_base = cm
  modified_base 14: mod_base = OTHER; note = 2'-O-methyladenosine
  modified_base 15: mod_base = OTHER; note = 2'-O-methyladenosine
  modified_base 16: mod_base = OTHER; note = 2'-O-methyladenosine
  modified_base 17: mod_base = um
  modified_base 18: mod_base = gm
  modified_base 19: mod_base = um
  modified_base 20: mod_base = OTHER; note = 2'-O-methyladenosine
  modified_base 21: mod_base = um
  source 1..21: mol_type = other RNA
caagctatgacccaaatgtat

SEQ ID NO: 402 - RNA, 21 nt, synthetic construct
  modified_base 1: mod_base = um
  modified_base 2: mod_base = gm
  modified_base 3: mod_base = um
  modified_base 4: mod_base = cm
  modified_base 5: mod_base = gm
  modified_base 6: mod_base = OTHER; note = 2'-O-methyladenosine
  modified_base 7: mod_base = um
  modified_base 8: mod_base = um
  modified_base 9: mod_base = OTHER; note = 2'-fluorocytidine
  modified_base 10: mod_base = OTHER; note = 2'-fluoroadenosine
  modified_base 11: mod_base = OTHER; note = 2'-fluoroguanosine
  modified_base 12: mod_base = OTHER; note = 2'-O-methyladenosine
  modified_base 13: mod_base = um
  modified_base 14: mod_base = cm
  modified_base 15: mod_base = um
  modified_base 16: mod_base = um
  modified_base 17: mod_base = OTHER; note = 2'-O-methyladenosine
  modified_base 18: mod_base = OTHER; note = 2'-O-methyladenosine
  modified_base 19: mod_base = um
  modified_base 20: mod_base = gm
  modified_base 21: mod_base = OTHER; note = 2'-O-methyladenosine
  source 1..21: mol_type = other RNA
tgtcgattcagatcttaatga

SEQ ID NO: 403 - RNA, 21 nt, synthetic construct
  modified_base 1: mod_base = gm
  modified_base 2: mod_base = cm
  modified_base 3: mod_base = um
  modified_base 4: mod_base = um
  modified_base 5: mod_base = gm
  modified_base 6: mod_base = cm
  modified_base 7: mod_base = um
  modified_base 8: mod_base = um
  modified_base 9: mod_base = OTHER; note = 2'-fluorouridine
  modified_base 10: mod_base = OTHER; note = 2'-fluorocytidine
  modified_base 11: mod_base = OTHER; note = 2'-fluoroguanosine
  modified_base 12: mod_base = um
  modified_base 13: mod_base = gm
  modified_base 14: mod_base = gm
  modified_base 15: mod_base = um
  modified_base 16: mod_base = OTHER; note = 2'-O-methyladenosine
  modified_base 17: mod_base = um
  modified_base 18: mod_base = um
  modified_base 19: mod_base = cm
  modified_base 20: mod_base = um
  modified_base 21: mod_base = um
  source 1..21: mol_type = other RNA
gcttgctttcgtggtattctt

SEQ ID NO: 404 - RNA, 21 nt, synthetic construct
  modified_base 1: mod_base = OTHER; note = 2'-O-methyladenosine
  modified_base 2: mod_base = gm
  modified_base 3: mod_base = OTHER; note = 2'-O-methyladenosine
  modified_base 4: mod_base = cm
  modified_base 5: mod_base = OTHER; note = 2'-O-methyladenosine
  modified_base 6: mod_base = OTHER; note = 2'-O-methyladenosine
  modified_base 7: mod_base = gm
  modified_base 8: mod_base = gm
  modified_base 9: mod_base = OTHER; note = 2'-fluoroadenosine
  modified_base 10: mod_base = OTHER; note = 2'-O-methyladenosine
  modified_base 11: mod_base = OTHER; note = 2'-fluorocytidine
  modified_base 12: mod_base = um
  modified_base 13: mod_base = OTHER; note = 2'-fluoroguanosine
  modified_base 14: mod_base = OTHER; note = 2'-O-methyladenosine
  modified_base 15: mod_base = um
  modified_base 16: mod_base = um
  modified_base 17: mod_base = OTHER; note = 2'-O-methyladenosine
  modified_base 18: mod_base = cm
  modified_base 19: mod_base = OTHER; note = 2'-O-methyladenosine
  modified_base 20: mod_base = OTHER; note = 2'-O-methyladenosine
  modified_base 21: mod_base = OTHER; note = 2'-O-methyladenosine
  source 1..21: mol_type = other RNA
agacaaggaactgattacaaa

SEQ ID NO: 405 - RNA, 21 nt, synthetic construct
  modified_base 1: mod_base = cm
  modified_base 2: mod_base = gm
  modified_base 3: mod_base = um
  modified_base 4: mod_base = OTHER; note = 2'-O-methyladenosine
  modified_base 5: mod_base = OTHER; note = 2'-O-methyladenosine
  modified_base 6: mod_base = um
  modified_base 7: mod_base = cm
  modified_base 8: mod_base = OTHER; note = 2'-O-methyladenosine
  modified_base 9: mod_base = OTHER; note = 2'-fluoroguanosine
  modified_base 10: mod_base = OTHER; note = 2'-fluoroguanosine
  modified_base 11: mod_base = OTHER; note = 2'-fluoroadenosine
  modified_base 12: mod_base = um
  modified_base 13: mod_base = gm
  modified_base 14: mod_base = um
  modified_base 15: mod_base = OTHER; note = 2'-O-methyladenosine
  modified_base 16: mod_base = OTHER; note = 2'-O-methyladenosine
  modified_base 17: mod_base = OTHER; note = 2'-O-methyladenosine
  modified_base 18: mod_base = cm
  modified_base 19: mod_base = um
  modified_base 20: mod_base = um
  modified_base 21: mod_base = OTHER; note = 2'-O-methyladenosine
  source 1..21: mol_type = other RNA
cgtaatcaggatgtaaactta

SEQ ID NO: 406 - RNA, 21 nt, synthetic construct
  modified_base 1: mod_base = cm
  modified_base 1^2: mod_base = OTHER; note = phosphorothioate linkage
  modified_base 2: mod_base = gm
  modified_base 3: mod_base = OTHER; note = 2'-O-methyladenosine
  modified_base 4: mod_base = OTHER; note = 2'-O-methyladenosine
  modified_base 5: mod_base = gm
  modified_base 6: mod_base = um
  modified_base 7: mod_base = OTHER; note = 2'-O-methyladenosine
  modified_base 8: mod_base = gm
  modified_base 9: mod_base = OTHER; note = 2'-fluorouridine
  modified_base 10: mod_base = gm
  modified_base 11: mod_base = OTHER; note = 2'-fluoroguanosine
  modified_base 12: mod_base = OTHER; note = 2'-O-methyladenosine
  modified_base 13: mod_base = OTHER; note = 2'-fluoroadenosine
  modified_base 14: mod_base = OTHER; note = 2'-O-methyladenosine
  modified_base 15: mod_base = OTHER; note = 2'-O-methyladenosine
  modified_base 16: mod_base = um
  modified_base 17: mod_base = cm
  modified_base 18: mod_base = cm
  modified_base 19: mod_base = um
  modified_base 20: mod_base = OTHER; note = 2'-O-methyladenosine
  modified_base 21: mod_base = OTHER; note = 2'-O-methyladenosine
  source 1..21: mol_type = other RNA
cgaagtagtggaaaatcctaa

SEQ ID NO: 407 - RNA, 21 nt, synthetic construct
  modified_base 1: mod_base = gm
  modified_base 1^2: mod_base = OTHER; note = phosphorothioate linkage
  modified_base 2: mod_base = gm
  modified_base 3: mod_base = OTHER; note = 2'-O-methyladenosine
  modified_base 4: mod_base = cm
  modified_base 5: mod_base = OTHER; note = 2'-O-methyladenosine
  modified_base 6: mod_base = OTHER; note = 2'-O-methyladenosine
  modified_base 7: mod_base = gm
  modified_base 8: mod_base = gm
  modified_base 9: mod_base = OTHER; note = 2'-fluoroadenosine
  modified_base 10: mod_base = OTHER; note = 2'-O-methyladenosine
  modified_base 11: mod_base = OTHER; note = 2'-fluorocytidine
  modified_base 12: mod_base = um
  modified_base 13: mod_base = OTHER; note = 2'-fluoroguanosine
  modified_base 14: mod_base = OTHER; note = 2'-O-methyladenosine
  modified_base 15: mod_base = um
  modified_base 16: mod_base = um
  modified_base 17: mod_base = OTHER; note = 2'-O-methyladenosine
  modified_base 18: mod_base = cm
  modified_base 19: mod_base = OTHER; note = 2'-O-methyladenosine
  modified_base 20: mod_base = OTHER; note = 2'-O-methyladenosine
  modified_base 21: mod_base = OTHER; note = 2'-O-methyladenosine
  source 1..21: mol_type = other RNA
ggacaaggaactgattacaaa

SEQ ID NO: 408 - RNA, 21 nt, synthetic construct
  modified_base 1: mod_base = um
  modified_base 1^2: mod_base = OTHER; note = phosphorothioate linkage
  modified_base 2: mod_base = gm
  modified_base 3: mod_base = cm
  modified_base 4: mod_base = um
  modified_base 5: mod_base = gm
  modified_base 6: mod_base = um
  modified_base 7: mod_base = gm
  modified_base 8: mod_base = gm
  modified_base 9: mod_base = OTHER; note = 2'-fluorouridine
  modified_base 10: mod_base = OTHER; note = 2'-fluorouridine
  modified_base 11: mod_base = OTHER; note = 2'-fluoroadenosine
  modified_base 12: mod_base = um
  modified_base 13: mod_base = OTHER; note = 2'-O-methyladenosine
  modified_base 14: mod_base = cm
  modified_base 15: mod_base = cm
  modified_base 16: mod_base = um
  modified_base 17: mod_base = OTHER; note = 2'-O-methyladenosine
  modified_base 18: mod_base = cm
  modified_base 19: mod_base = um
  modified_base 20: mod_base = OTHER; note = 2'-O-methyladenosine
  modified_base 21: mod_base = OTHER; note = 2'-O-methyladenosine
  source 1..21: mol_type = other RNA
tgctgtggttatacctactaa

SEQ ID NO: 409 - RNA, 21 nt, synthetic construct
  modified_base 1: mod_base = cm
  modified_base 1^2: mod_base = OTHER; note = phosphorothioate linkage
  modified_base 2: mod_base = OTHER; note = 2'-O-methyladenosine
  modified_base 3: mod_base = um
  modified_base 4: mod_base = OTHER; note = 2'-O-methyladenosine
  modified_base 5: mod_base = cm
  modified_base 6: mod_base = OTHER; note = 2'-O-methyladenosine
  modified_base 7: mod_base = OTHER; note = 2'-O-methyladenosine
  modified_base 8: mod_base = um
  modified_base 9: mod_base = OTHER; note = 2'-fluoroguanosine
  modified_base 10: mod_base = cm
  modified_base 11: mod_base = OTHER; note = 2'-fluorouridine
  modified_base 12: mod_base = OTHER; note = 2'-O-methyladenosine
  modified_base 13: mod_base = OTHER; note = 2'-fluoroguanosine
  modified_base 14: mod_base = um
  modified_base 15: mod_base = um
  modified_base 16: mod_base = OTHER; note = 2'-O-methyladenosine
  modified_base 17: mod_base = OTHER; note = 2'-O-methyladenosine
  modified_base 18: mod_base = OTHER; note = 2'-O-methyladenosine
  modified_base 19: mod_base = cm
  modified_base 20: mod_base = OTHER; note = 2'-O-methyladenosine
  modified_base 21: mod_base = OTHER; note = 2'-O-methyladenosine
  source 1..21: mol_type = other RNA
catacaatgctagttaaacaa

SEQ ID NO: 410 - RNA, 21 nt, synthetic construct
  modified_base 1: mod_base = cm
  modified_base 1^2: mod_base = OTHER; note = phosphorothioate linkage
  modified_base 2: mod_base = gm
  modified_base 3: mod_base = um
  modified_base 4: mod_base = OTHER; note = 2'-O-methyladenosine
  modified_base 5: mod_base = OTHER; note = 2'-O-methyladenosine
  modified_base 6: mod_base = um
  modified_base 7: mod_base = cm
  modified_base 8: mod_base = OTHER; note = 2'-O-methyladenosine
  modified_base 9: mod_base = OTHER; note = 2'-fluoroguanosine
  modified_base 10: mod_base = gm
  modified_base 11: mod_base = OTHER; note = 2'-fluoroadenosine
  modified_base 12: mod_base = um
  modified_base 13: mod_base = OTHER; note = 2'-fluoroguanosine
  modified_base 14: mod_base = um
  modified_base 15: mod_base = OTHER; note = 2'-O-methyladenosine
  modified_base 16: mod_base = OTHER; note = 2'-O-methyladenosine
  modified_base 17: mod_base = OTHER; note = 2'-O-methyladenosine
  modified_base 18: mod_base = cm
  modified_base 19: mod_base = um
  modified_base 20: mod_base = um
  modified_base 21: mod_base = OTHER; note = 2'-O-methyladenosine
  source 1..21: mol_type = other RNA
cgtaatcaggatgtaaactta

SEQ ID NO: 411 - RNA, 21 nt, synthetic construct
  modified_base 1: mod_base = um
  modified_base 2: mod_base = gm
  modified_base 3: mod_base = cm
  modified_base 4: mod_base = um
  modified_base 5: mod_base = gm
  modified_base 6: mod_base = um
  modified_base 7: mod_base = gm
  modified_base 8: mod_base = gm
  modified_base 9: mod_base = OTHER; note = 2'-fluorouridine
  modified_base 10: mod_base = um
  modified_base 11: mod_base = OTHER; note = 2'-fluoroadenosine
  modified_base 12: mod_base = um
  modified_base 13: mod_base = OTHER; note = 2'-fluoroadenosine
  modified_base 14: mod_base = cm
  modified_base 15: mod_base = cm
  modified_base 16: mod_base = um
  modified_base 17: mod_base = OTHER; note = 2'-O-methyladenosine
  modified_base 18: mod_base = cm
  modified_base 19: mod_base = um
  modified_base 20: mod_base = OTHER; note = 2'-O-methyladenosine
  modified_base 21: mod_base = OTHER; note = 2'-O-methyladenosine
  source 1..21: mol_type = other RNA
tgctgtggttatacctactaa

SEQ ID NO: 412 - RNA, 21 nt, synthetic construct
  modified_base 1: mod_base = um
  modified_base 2: mod_base = gm
  modified_base 3: mod_base = cm
  modified_base 4: mod_base = um
  modified_base 5: mod_base = gm
  modified_base 6: mod_base = um
  modified_base 7: mod_base = gm
  modified_base 8: mod_base = gm
  modified_base 9: mod_base = OTHER; note = 2'-fluorouridine
  modified_base 10: mod_base = um
  modified_base 11: mod_base = OTHER; note = 2'-fluoroadenosine
  modified_base 12: mod_base = OTHER; note = 2'-fluorouridine
  modified_base 13: mod_base = OTHER; note = 2'-O-methyladenosine
  modified_base 14: mod_base = cm
  modified_base 15: mod_base = cm
  modified_base 16: mod_base = um
  modified_base 17: mod_base = OTHER; note = 2'-O-methyladenosine
  modified_base 18: mod_base = cm
  modified_base 19: mod_base = um
  modified_base 20: mod_base = OTHER; note = 2'-O-methyladenosine
  modified_base 21: mod_base = OTHER; note = 2'-O-methyladenosine
  source 1..21: mol_type = other RNA
tgctgtggttatacctactaa

SEQ ID NO: 413 - RNA, 21 nt, synthetic construct
  modified_base 1: mod_base = cm
  modified_base 2: mod_base = gm
  modified_base 3: mod_base = OTHER; note = 2'-O-methyladenosine
  modified_base 4: mod_base = cm
  modified_base 5: mod_base = OTHER; note = 2'-O-methyladenosine
  modified_base 6: mod_base = OTHER; note = 2'-O-methyladenosine
  modified_base 7: mod_base = gm
  modified_base 8: mod_base = gm
  modified_base 9: mod_base = OTHER; note = 2'-fluoroadenosine
  modified_base 10: mod_base = OTHER; note = 2'-fluoroadenosine
  modified_base 11: mod_base = OTHER; note = 2'-fluorocytidine
  modified_base 12: mod_base = um
  modified_base 13: mod_base = gm
  modified_base 14: mod_base = OTHER; note = 2'-O-methyladenosine
  modified_base 15: mod_base = um
  modified_base 16: mod_base = um
  modified_base 17: mod_base = OTHER; note = 2'-O-methyladenosine
  modified_base 18: mod_base = cm
  modified_base 19: mod_base = OTHER; note = 2'-O-methyladenosine
  modified_base 20: mod_base = OTHER; note = 2'-O-methyladenosine
  modified_base 21: mod_base = OTHER; note = 2'-O-methyladenosine
  source 1..21: mol_type = other RNA
cgacaaggaactgattacaaa

SEQ ID NO: 414 - RNA, 21 nt, synthetic construct
  modified_base 1: mod_base = um
  modified_base 2: mod_base = gm
  modified_base 3: mod_base = cm
  modified_base 4: mod_base = um
  modified_base 5: mod_base = gm
  modified_base 6: mod_base = um
  modified_base 7: mod_base = gm
  modified_base 8: mod_base = gm
  modified_base 9: mod_base = OTHER; note = 2'-fluorouridine
  modified_base 10: mod_base = um
  modified_base 11: mod_base = OTHER; note = 2'-fluoroadenosine
  modified_base 12: mod_base = um
  modified_base 13: mod_base = OTHER; note = 2'-O-methyladenosine
  modified_base 14: mod_base = cm
  modified_base 15: mod_base = cm
  modified_base 16: mod_base = um
  modified_base 17: mod_base = OTHER; note = 2'-O-methyladenosine
  modified_base 18: mod_base = cm
  modified_base 19: mod_base = um
  modified_base 20: mod_base = OTHER; note = 2'-O-methyladenosine
  modified_base 21: mod_base = OTHER; note = 2'-O-methyladenosine
  source 1..21: mol_type = other RNA
tgctgtggttatacctactaa

SEQ ID NO: 415 - RNA, 21 nt, synthetic construct
  modified_base 1: mod_base = gm
  modified_base 2: mod_base = gm
  modified_base 3: mod_base = OTHER; note = 2'-O-methyladenosine
  modified_base 4: mod_base = cm
  modified_base 5: mod_base = OTHER; note = 2'-O-methyladenosine
  modified_base 6: mod_base = OTHER; note = 2'-O-methyladenosine
  modified_base 7: mod_base = gm
  modified_base 8: mod_base = gm
  modified_base 9: mod_base = OTHER; note = 2'-fluoroadenosine
  modified_base 10: mod_base = OTHER; note = 2'-O-methyladenosine
  modified_base 11: mod_base = OTHER; note = 2'-fluorocytidine
  modified_base 12: mod_base = um
  modified_base 13: mod_base = gm
  modified_base 14: mod_base = OTHER; note = 2'-O-methyladenosine
  modified_base 15: mod_base = um
  modified_base 16: mod_base = um
  modified_base 17: mod_base = OTHER; note = 2'-O-methyladenosine
  modified_base 18: mod_base = cm
  modified_base 19: mod_base = OTHER; note = 2'-O-methyladenosine
  modified_base 20: mod_base = OTHER; note = 2'-O-methyladenosine
  modified_base 21: mod_base = OTHER; note = 2'-O-methyladenosine
  source 1..21: mol_type = other RNA
ggacaaggaactgattacaaa

SEQ ID NO: 416 - RNA, 21 nt, synthetic construct
  modified_base 1: mod_base = um
  modified_base 1^2: mod_base = OTHER; note = phosphorothioate linkage
  modified_base 2: mod_base = gm
  modified_base 3: mod_base = cm
  modified_base 4: mod_base = um
  modified_base 5: mod_base = gm
  modified_base 6: mod_base = um
  modified_base 7: mod_base = gm
  modified_base 8: mod_base = gm
  modified_base 9: mod_base = OTHER; note = 2'-fluorouridine
  modified_base 10: mod_base = um
  modified_base 11: mod_base = OTHER; note = 2'-fluoroadenosine
  modified_base 12: mod_base = um
  modified_base 13: mod_base = OTHER; note = 2'-O-methyladenosine
  modified_base 14: mod_base = cm
  modified_base 15: mod_base = cm
  modified_base 16: mod_base = um
  modified_base 17: mod_base = OTHER; note = 2'-O-methyladenosine
  modified_base 18: mod_base = cm
  modified_base 19: mod_base = um
  modified_base 20: mod_base = OTHER; note = 2'-O-methyladenosine
  modified_base 21: mod_base = OTHER; note = 2'-O-methyladenosine
  source 1..21: mol_type = other RNA
tgctgtggttatacctactaa

SEQ ID NO: 417 - RNA, 21 nt, synthetic construct
  modified_base 1: mod_base = gm
  modified_base 1^2: mod_base = OTHER; note = phosphorothioate linkage
  modified_base 2: mod_base = cm
  modified_base 3: mod_base = um
  modified_base 4: mod_base = um
  modified_base 5: mod_base = cm
  modified_base 6: mod_base = um
  modified_base 7: mod_base = um
  modified_base 8: mod_base = OTHER; note = 2'-O-methyladenosine
  modified_base 9: mod_base = OTHER; note = 2'-fluoroadenosine
  modified_base 10: mod_base = OTHER; note = 2'-fluoroguanosine
  modified_base 11: mod_base = OTHER; note = 2'-fluoroadenosine
  modified_base 12: mod_base = gm
  modified_base 13: mod_base = um
  modified_base 14: mod_base = gm
  modified_base 15: mod_base = cm
  modified_base 16: mod_base = um
  modified_base 17: mod_base = um
  modified_base 18: mod_base = OTHER; note = 2'-O-methyladenosine
  modified_base 19: mod_base = um
  modified_base 20: mod_base = gm
  modified_base 21: mod_base = OTHER; note = 2'-O-methyladenosine
  source 1..21: mol_type = other RNA
gcttcttaagagtgcttatga

SEQ ID NO: 418 - RNA, 21 nt, synthetic construct
  modified_base 1: mod_base = cm
  modified_base 1^2: mod_base = OTHER; note = phosphorothioate linkage
  modified_base 2: mod_base = um
  modified_base 3: mod_base = um
  modified_base 4: mod_base = OTHER; note = 2'-O-methyladenosine
  modified_base 5: mod_base = gm
  modified_base 6: mod_base = OTHER; note = 2'-O-methyladenosine
  modified_base 7: mod_base = cm
  modified_base 8: mod_base = OTHER; note = 2'-O-methyladenosine
  modified_base 9: mod_base = OTHER; note = 2'-fluoroadenosine
  modified_base 10: mod_base = OTHER; note = 2'-fluorouridine
  modified_base 11: mod_base = OTHER; note = 2'-fluoroguanosine
  modified_base 12: mod_base = um
  modified_base 13: mod_base = cm
  modified_base 14: mod_base = um
  modified_base 15: mod_base = um
  modified_base 16: mod_base = OTHER; note = 2'-O-methyladenosine
  modified_base 17: mod_base = um
  modified_base 18: mod_base = cm
  modified_base 19: mod_base = um
  modified_base 20: mod_base = OTHER; note = 2'-O-methyladenosine
  modified_base 21: mod_base = OTHER; note = 2'-O-methyladenosine
  source 1..21: mol_type = other RNA
cttagacaatgtcttatctaa

SEQ ID NO: 419 - RNA, 21 nt, synthetic construct
  modified_base 1: mod_base = gm
  modified_base 1^2: mod_base = OTHER; note = phosphorothioate linkage
  modified_base 2: mod_base = cm
  modified_base 3: mod_base = OTHER; note = 2'-O-methyladenosine
  modified_base 4: mod_base = um
  modified_base 5: mod_base = um
  modified_base 6: mod_base = OTHER; note = 2'-O-methyladenosine
  modified_base 7: mod_base = OTHER; note = 2'-O-methyladenosine
  modified_base 8: mod_base = um
  modified_base 9: mod_base = OTHER; note = 2'-fluoroguanosine
  modified_base 10: mod_base = OTHER; note = 2'-fluoroguanosine
  modified_base 11: mod_base = OTHER; note = 2'-fluorocytidine
  modified_base 12: mod_base = OTHER; note = 2'-O-methyladenosine
  modified_base 13: mod_base = OTHER; note = 2'-O-methyladenosine
  modified_base 14: mod_base = um
  modified_base 15: mod_base = cm
  modified_base 16: mod_base = um
  modified_base 17: mod_base = um
  modified_base 18: mod_base = cm
  modified_base 19: mod_base = OTHER; note = 2'-O-methyladenosine
  modified_base 20: mod_base = um
  modified_base 21: mod_base = OTHER; note = 2'-O-methyladenosine
  source 1..21: mol_type = other RNA
gcattaatggcaatcttcata

SEQ ID NO: 420 - RNA, 21 nt, synthetic construct
  modified_base 1: mod_base = gm
  modified_base 1^2: mod_base = OTHER; note = phosphorothioate linkage
  modified_base 2: mod_base = OTHER; note = 2'-O-methyladenosine
  modified_base 3: mod_base = um
  modified_base 4: mod_base = gm
  modified_base 5: mod_base = cm
  modified_base 6: mod_base = um
  modified_base 7: mod_base = um
  modified_base 8: mod_base = OTHER; note = 2'-O-methyladenosine
  modified_base 9: mod_base = OTHER; note = 2'-fluorocytidine
  modified_base 10: mod_base = OTHER; note = 2'-fluoroguanosine
  modified_base 11: mod_base = OTHER; note = 2'-fluorouridine
  modified_base 12: mod_base = um
  modified_base 13: mod_base = OTHER; note = 2'-O-methyladenosine
  modified_base 14: mod_base = OTHER; note = 2'-O-methyladenosine
  modified_base 15: mod_base = um
  modified_base 16: mod_base = OTHER; note = 2'-O-methyladenosine
  modified_base 17: mod_base = cm
  modified_base 18: mod_base = gm
  modified_base 19: mod_base = um
  modified_base 20: mod_base = um
  modified_base 21: mod_base = um
  source 1..21: mol_type = other RNA
gatgcttacgttaatacgttt

SEQ ID NO: 421 - RNA, 21 nt, synthetic construct
  modified_base 1: mod_base = gm
  modified_base 1^2: mod_base = OTHER; note = phosphorothioate linkage
  modified_base 2: mod_base = cm
  modified_base 3: mod_base = OTHER; note = 2'-O-methyladenosine
  modified_base 4: mod_base = cm
  modified_base 5: mod_base = cm
  modified_base 6: mod_base = um
  modified_base 7: mod_base = um
  modified_base 8: mod_base = um
  modified_base 9: mod_base = OTHER; note = 2'-fluoroguanosine
  modified_base 10: mod_base = OTHER; note = 2'-fluoroadenosine
  modified_base 11: mod_base = OTHER; note = 2'-fluorocytidine
  modified_base 12: mod_base = OTHER; note = 2'-O-methyladenosine
  modified_base 13: mod_base = OTHER; note = 2'-O-methyladenosine
  modified_base 14: mod_base = um
  modified_base 15: mod_base = cm
  modified_base 16: mod_base = um
  modified_base 17: mod_base = um
  modified_base 18: mod_base = OTHER; note = 2'-O-methyladenosine
  modified_base 19: mod_base = OTHER; note = 2'-O-methyladenosine
  modified_base 20: mod_base = gm
  modified_base 21: mod_base = OTHER; note = 2'-O-methyladenosine
  source 1..21: mol_type = other RNA
gcacctttgacaatcttaaga

SEQ ID NO: 422 - RNA, 21 nt, synthetic construct
  modified_base 1: mod_base = gm
  modified_base 1^2: mod_base = OTHER; note = phosphorothioate linkage
  modified_base 2: mod_base = gm
  modified_base 3: mod_base = OTHER; note = 2'-O-methyladenosine
  modified_base 4: mod_base = OTHER; note = 2'-O-methyladenosine
  modified_base 5: mod_base = gm
  modified_base 6: mod_base = um
  modified_base 7: mod_base = OTHER; note = 2'-O-methyladenosine
  modified_base 8: mod_base = gm
  modified_base 9: mod_base = OTHER; note = 2'-fluorouridine
  modified_base 10: mod_base = OTHER; note = 2'-fluoroguanosine
  modified_base 11: mod_base = OTHER; note = 2'-fluoroguanosine
  modified_base 12: mod_base = OTHER; note = 2'-O-methyladenosine
  modified_base 13: mod_base = OTHER; note = 2'-O-methyladenosine
  modified_base 14: mod_base = OTHER; note = 2'-O-methyladenosine
  modified_base 15: mod_base = OTHER; note = 2'-O-methyladenosine
  modified_base 16: mod_base = um
  modified_base 17: mod_base = cm
  modified_base 18: mod_base = cm
  modified_base 19: mod_base = um
  modified_base 20: mod_base = OTHER; note = 2'-O-methyladenosine
  modified_base 21: mod_base = OTHER; note = 2'-O-methyladenosine
  source 1..21: mol_type = other RNA
ggaagtagtggaaaatcctaa

SEQ ID NO: 423 - RNA, 21 nt, synthetic construct
  modified_base 1: mod_base = cm
  modified_base 1^2: mod_base = OTHER; note = phosphorothioate linkage
  modified_base 2: mod_base = cm
  modified_base 3: mod_base = um
  modified_base 4: mod_base = um
  modified_base 5: mod_base = um
  modified_base 6: mod_base = um
  modified_base 7: mod_base = gm
  modified_base 8: mod_base = OTHER; note = 2'-O-methyladenosine
  modified_base 9: mod_base = OTHER; note = 2'-fluorouridine
  modified_base 10: mod_base = OTHER; note = 2'-fluoroguanosine
  modified_base 11: mod_base = OTHER; note = 2'-fluorouridine
  modified_base 12: mod_base = um
  modified_base 13: mod_base = gm
  modified_base 14: mod_base = um
  modified_base 15: mod_base = um
  modified_base 16: mod_base = OTHER; note = 2'-O-methyladenosine
  modified_base 17: mod_base = gm
  modified_base 18: mod_base = OTHER; note = 2'-O-methyladenosine
  modified_base 19: mod_base = cm
  modified_base 20: mod_base = OTHER; note = 2'-O-methyladenosine
  modified_base 21: mod_base = OTHER; note = 2'-O-methyladenosine
  source 1..21: mol_type = other RNA
ccttttgatgttgttagacaa

SEQ ID NO: 424 - RNA, 21 nt, synthetic construct
  modified_base 1: mod_base = um
  modified_base 1^2: mod_base = OTHER; note = phosphorothioate linkage
  modified_base 2: mod_base = gm
  modified_base 3: mod_base = gm
  modified_base 4: mod_base = um
  modified_base 5: mod_base = OTHER; note = 2'-O-methyladenosine
  modified_base 6: mod_base = OTHER; note = 2'-O-methyladenosine
  modified_base 7: mod_base = um
  modified_base 8: mod_base = gm
  modified_base 9: mod_base = OTHER; note = 2'-fluorocytidine
  modified_base 10: mod_base = OTHER; note = 2'-fluorouridine
  modified_base 11: mod_base = OTHER; note = 2'-fluorouridine
  modified_base 12: mod_base = um
  modified_base 13: mod_base = OTHER; note = 2'-O-methyladenosine
  modified_base 14: mod_base = gm
  modified_base 15: mod_base = OTHER; note = 2'-O-methyladenosine
  modified_base 16: mod_base = um
  modified_base 17: mod_base = cm
  modified_base 18: mod_base = OTHER; note = 2'-O-methyladenosine
  modified_base 19: mod_base = OTHER; note = 2'-O-methyladenosine
  modified_base 20: mod_base = gm
  modified_base 21: mod_base = OTHER; note = 2'-O-methyladenosine
  source 1..21: mol_type = other RNA
tggtaatgctttagatcaaga

SEQ ID NO: 425 - RNA, 21 nt, synthetic construct
  modified_base 1: mod_base = cm
  modified_base 1^2: mod_base = OTHER; note = phosphorothioate linkage
  modified_base 2: mod_base = OTHER; note = 2'-O-methyladenosine
  modified_base 3: mod_base = OTHER; note = 2'-O-methyladenosine
  modified_base 4: mod_base = gm
  modified_base 5: mod_base = cm
  modified_base 6: mod_base = um
  modified_base 7: mod_base = OTHER; note = 2'-O-methyladenosine
  modified_base 8: mod_base = um
  modified_base 9: mod_base = OTHER; note = 2'-fluoroguanosine
  modified_base 10: mod_base = OTHER; note = 2'-fluoroadenosine
  modified_base 11: mod_base = OTHER; note = 2'-fluorocytidine
  modified_base 12: mod_base = cm
  modified_base 13: mod_base = cm
  modified_base 14: mod_base = OTHER; note = 2'-O-methyladenosine
  modified_base 15: mod_base = OTHER; note = 2'-O-methyladenosine
  modified_base 16: mod_base = OTHER; note = 2'-O-methyladenosine
  modified_base 17: mod_base = um
  modified_base 18: mod_base = gm
  modified_base 19: mod_base = um
  modified_base 20: mod_base = OTHER; note = 2'-O-methyladenosine
  modified_base 21: mod_base = um
  source 1..21: mol_type = other RNA
caagctatgacccaaatgtat

SEQ ID NO: 426 - RNA, 21 nt, synthetic construct
  modified_base 1: mod_base = gm
  modified_base 1^2: mod_base = OTHER; note = phosphorothioate linkage
  modified_base 2: mod_base = um
  modified_base 3: mod_base = cm
  modified_base 4: mod_base = cm
  modified_base 5: mod_base = OTHER; note = 2'-O-methyladenosine
  modified_base 6: mod_base = OTHER; note = 2'-O-methyladenosine
  modified_base 7: mod_base = gm
  modified_base 8: mod_base = OTHER; note = 2'-O-methyladenosine
  modified_base 9: mod_base = OTHER; note = 2'-fluorouridine
  modified_base 10: mod_base = OTHER; note = 2'-fluoroguanosine
  modified_base 11: mod_base = OTHER; note = 2'-fluoroguanosine
  modified_base 12: mod_base = um
  modified_base 13: mod_base = OTHER; note = 2'-O-methyladenosine
  modified_base 14: mod_base = um
  modified_base 15: mod_base = um
  modified_base 16: mod_base = um
  modified_base 17: mod_base = cm
  modified_base 18: mod_base = um
  modified_base 19: mod_base = OTHER; note = 2'-O-methyladenosine
  modified_base 20: mod_base = cm
  modified_base 21: mod_base = um
  source 1..21: mol_type = other RNA
gtccaagatggtatttctact

SEQ ID NO: 427 - RNA, 21 nt, synthetic construct
  modified_base 1: mod_base = cm
  modified_base 1^2: mod_base = OTHER; note = phosphorothioate linkage
  modified_base 2: mod_base = OTHER; note = 2'-O-methyladenosine
  modified_base 3: mod_base = OTHER; note = 2'-O-methyladenosine
  modified_base 4: mod_base = gm
  modified_base 5: mod_base = OTHER; note = 2'-O-methyladenosine
  modified_base 6: mod_base = um
  modified_base 7: mod_base = gm
  modified_base 8: mod_base = gm
  modified_base 9: mod_base = OTHER; note = 2'-fluorouridine
  modified_base 10: mod_base = OTHER; note = 2'-fluoroadenosine
  modified_base 11: mod_base = OTHER; note = 2'-fluorouridine
  modified_base 12: mod_base = um
  modified_base 13: mod_base = um
  modified_base 14: mod_base = cm
  modified_base 15: mod_base = um
  modified_base 16: mod_base = OTHER; note = 2'-O-methyladenosine
  modified_base 17: mod_base = cm
  modified_base 18: mod_base = um
  modified_base 19: mod_base = OTHER; note = 2'-O-methyladenosine
  modified_base 20: mod_base = cm
  modified_base 21: mod_base = OTHER; note = 2'-O-methyladenosine
  source 1..21: mol_type = other RNA
caagatggtatttctactaca

SEQ ID NO: 428 - RNA, 21 nt, synthetic construct
  modified_base 1: mod_base = cm
  modified_base 1^2: mod_base = OTHER; note = phosphorothioate linkage
  modified_base 2: mod_base = cm
  modified_base 3: mod_base = OTHER; note = 2'-O-methyladenosine
  modified_base 4: mod_base = cm
  modified_base 5: mod_base = um
  modified_base 6: mod_base = OTHER; note = 2'-O-methyladenosine
  modified_base 7: mod_base = OTHER; note = 2'-O-methyladenosine
  modified_base 8: mod_base = OTHER; note = 2'-O-methyladenosine
  modified_base 9: mod_base = OTHER; note = 2'-fluoroguanosine
  modified_base 10: mod_base = OTHER; note = 2'-fluorocytidine
  modified_base 11: mod_base = OTHER; note = 2'-fluoroadenosine
  modified_base 12: mod_base = um
  modified_base 13: mod_base = OTHER; note = 2'-O-methyladenosine
  modified_base 14: mod_base = cm
  modified_base 15: mod_base = OTHER; note = 2'-O-methyladenosine
  modified_base 16: mod_base = OTHER; note = 2'-O-methyladenosine
  modified_base 17: mod_base = um
  modified_base 18: mod_base = gm
  modified_base 19: mod_base = um
  modified_base 20: mod_base = OTHER; note = 2'-O-methyladenosine
  modified_base 21: mod_base = OTHER; note = 2'-O-methyladenosine
  source 1..21: mol_type = other RNA
ccactaaagcatacaatgtaa

SEQ ID NO: 429 - RNA, 21 nt, synthetic construct
  modified_base 1: mod_base = gm
  modified_base 1^2: mod_base = OTHER; note = phosphorothioate linkage
  modified_base 2: mod_base = gm
  modified_base 3: mod_base = OTHER; note = 2'-O-methyladenosine
  modified_base 4: mod_base = cm
  modified_base 5: mod_base = OTHER; note = 2'-O-methyladenosine
  modified_base 6: mod_base = OTHER; note = 2'-O-methyladenosine
  modified_base 7: mod_base = gm
  modified_base 8: mod_base = gm
  modified_base 9: mod_base = OTHER; note = 2'-fluoroadenosine
  modified_base 10: mod_base = OTHER; note = 2'-fluoroadenosine
  modified_base 11: mod_base = OTHER; note = 2'-fluorocytidine
  modified_base 12: mod_base = um
  modified_base 13: mod_base = gm
  modified_base 14: mod_base = OTHER; note = 2'-O-methyladenosine
  modified_base 15: mod_base = um
  modified_base 16: mod_base = um
  modified_base 17: mod_base = OTHER; note = 2'-O-methyladenosine
  modified_base 18: mod_base = cm
  modified_base 19: mod_base = OTHER; note = 2'-O-methyladenosine
  modified_base 20: mod_base = OTHER; note = 2'-O-methyladenosine
  modified_base 21: mod_base = OTHER; note = 2'-O-methyladenosine
  source 1..21: mol_type = other RNA
ggacaaggaactgattacaaa

SEQ ID NO: 430 - RNA, 21 nt, synthetic construct
  modified_base 1: mod_base = gm
  modified_base 1^2: mod_base = OTHER; note = phosphorothioate linkage
  modified_base 2: mod_base = cm
  modified_base 3: mod_base = OTHER; note = 2'-O-methyladenosine
  modified_base 4: mod_base = um
  modified_base 5: mod_base = gm
  modified_base 6: mod_base = gm
  modified_base 7: mod_base = um
  modified_base 8: mod_base = OTHER; note = 2'-O-methyladenosine
  modified_base 9: mod_base = OTHER; note = 2'-fluorocytidine
  modified_base 10: mod_base = OTHER; note = 2'-fluorocytidine
  modified_base 11: mod_base = OTHER; note = 2'-fluoroadenosine
  modified_base 12: mod_base = cm
  modified_base 13: mod_base = OTHER; note = 2'-O-methyladenosine
  modified_base 14: mod_base = um
  modified_base 15: mod_base = OTHER; note = 2'-O-methyladenosine
  modified_base 16: mod_base = um
  modified_base 17: mod_base = OTHER; note = 2'-O-methyladenosine
  modified_base 18: mod_base = um
  modified_base 19: mod_base = cm
  modified_base 20: mod_base = OTHER; note = 2'-O-methyladenosine
  modified_base 21: mod_base = OTHER; note = 2'-O-methyladenosine
  source 1..21: mol_type = other RNA
gcatggtaccacatatatcaa

SEQ ID NO: 431 - RNA, 21 nt, synthetic construct
  modified_base 1: mod_base = gm
  modified_base 1^2: mod_base = OTHER; note = phosphorothioate linkage
  modified_base 2: mod_base = um
  modified_base 3: mod_base = OTHER; note = 2'-O-methyladenosine
  modified_base 4: mod_base = cm
  modified_base 5: mod_base = um
  modified_base 6: mod_base = gm
  modified_base 7: mod_base = OTHER; note = 2'-O-methyladenosine
  modified_base 8: mod_base = cm
  modified_base 9: mod_base = OTHER; note = 2'-fluoroadenosine
  modified_base 10: mod_base = OTHER; note = 2'-fluorouridine
  modified_base 11: mod_base = OTHER; note = 2'-fluorouridine
  modified_base 12: mod_base = OTHER; note = 2'-O-methyladenosine
  modified_base 13: mod_base = gm
  modified_base 14: mod_base = OTHER; note = 2'-O-methyladenosine
  modified_base 15: mod_base = um
  modified_base 16: mod_base = OTHER; note = 2'-O-methyladenosine
  modified_base 17: mod_base = OTHER; note = 2'-O-methyladenosine
  modified_base 18: mod_base = um
  modified_base 19: mod_base = cm
  modified_base 20: mod_base = OTHER; note = 2'-O-methyladenosine
  modified_base 21: mod_base = OTHER; note = 2'-O-methyladenosine
  source 1..21: mol_type = other RNA
gtactgacattagataatcaa

SEQ ID NO: 432 - RNA, 21 nt, synthetic construct
  modified_base 1: mod_base = gm
  modified_base 1^2: mod_base = OTHER; note = phosphorothioate linkage
  modified_base 2: mod_base = gm
  modified_base 3: mod_base = OTHER; note = 2'-O-methyladenosine
  modified_base 4: mod_base = um
  modified_base 5: mod_base = gm
  modified_base 6: mod_base = um
  modified_base 7: mod_base = OTHER; note = 2'-O-methyladenosine
  modified_base 8: mod_base = OTHER; note = 2'-O-methyladenosine
  modified_base 9: mod_base = OTHER; note = 2'-fluoroadenosine
  modified_base 10: mod_base = OTHER; note = 2'-fluorocytidine
  modified_base 11: mod_base = OTHER; note = 2'-fluorouridine
  modified_base 12: mod_base = um
  modified_base 13: mod_base = OTHER; note = 2'-O-methyladenosine
  modified_base 14: mod_base = cm
  modified_base 15: mod_base = OTHER; note = 2'-O-methyladenosine
  modified_base 16: mod_base = um
  modified_base 17: mod_base = OTHER; note = 2'-O-methyladenosine
  modified_base 18: mod_base = gm
  modified_base 19: mod_base = cm
  modified_base 20: mod_base = um
  modified_base 21: mod_base = OTHER; note = 2'-O-methyladenosine
  source 1..21: mol_type = other RNA
ggatgtaaacttacatagcta

SEQ ID NO: 433 - RNA, 21 nt, synthetic construct
  modified_base 1: mod_base = cm
  modified_base 1^2: mod_base = OTHER; note = phosphorothioate linkage
  modified_base 2: mod_base = OTHER; note = 2'-O-methyladenosine
  modified_base 3: mod_base = um
  modified_base 4: mod_base = OTHER; note = 2'-O-methyladenosine
  modified_base 5: mod_base = cm
  modified_base 6: mod_base = OTHER; note = 2'-O-methyladenosine
  modified_base 7: mod_base = OTHER; note = 2'-O-methyladenosine
  modified_base 8: mod_base = um
  modified_base 9: mod_base = OTHER; note = 2'-fluoroguanosine
  modified_base 10: mod_base = OTHER; note = 2'-fluorocytidine
  modified_base 11: mod_base = OTHER; note = 2'-fluorouridine
  modified_base 12: mod_base = OTHER; note = 2'-O-methyladenosine
  modified_base 13: mod_base = gm
  modified_base 14: mod_base = um
  modified_base 15: mod_base = um
  modified_base 16: mod_base = OTHER; note = 2'-O-methyladenosine
  modified_base 17: mod_base = OTHER; note = 2'-O-methyladenosine
  modified_base 18: mod_base = OTHER; note = 2'-O-methyladenosine
  modified_base 19: mod_base = cm
  modified_base 20: mod_base = OTHER; note = 2'-O-methyladenosine
  modified_base 21: mod_base = OTHER; note = 2'-O-methyladenosine
  source 1..21: mol_type = other RNA
catacaatgctagttaaacaa

SEQ ID NO: 434 - RNA, 21 nt, synthetic construct
  modified_base 1: mod_base = um
  modified_base 1^2: mod_base = OTHER; note = phosphorothioate linkage
  modified_base 2: mod_base = gm
  modified_base 3: mod_base = cm
  modified_base 4: mod_base = um
  modified_base 5: mod_base = gm
  modified_base 6: mod_base = um
  modified_base 7: mod_base = gm
  modified_base 8: mod_base = gm
  modified_base 9: mod_base = OTHER; note = 2'-fluorouridine
  modified_base 10: mod_base = um
  modified_base 11: mod_base = OTHER; note = 2'-fluoroadenosine
  modified_base 12: mod_base = um
  modified_base 13: mod_base = OTHER; note = 2'-fluoroadenosine
  modified_base 14: mod_base = cm
  modified_base 15: mod_base = cm
  modified_base 16: mod_base = um
  modified_base 17: mod_base = OTHER; note = 2'-O-methyladenosine
  modified_base 18: mod_base = cm
  modified_base 19: mod_base = um
  modified_base 20: mod_base = OTHER; note = 2'-O-methyladenosine
  modified_base 21: mod_base = OTHER; note = 2'-O-methyladenosine
  source 1..21: mol_type = other RNA
tgctgtggttatacctactaa

SEQ ID NO: 435 - RNA, 21 nt, synthetic construct
  modified_base 1: mod_base = gm
  modified_base 1^2: mod_base = OTHER; note = phosphorothioate linkage
  modified_base 2: mod_base = cm
  modified_base 3: mod_base = OTHER; note = 2'-O-methyladenosine
  modified_base 4: mod_base = OTHER; note = 2'-O-methyladenosine
  modified_base 5: mod_base = um
  modified_base 6: mod_base = cm
  modified_base 7: mod_base = OTHER; note = 2'-fluorouridine
  modified_base 8: mod_base = um
  modified_base 9: mod_base = OTHER; note = 2'-fluoroadenosine
  modified_base 10: mod_base = OTHER; note = 2'-O-methyladenosine
  modified_base 11: mod_base = OTHER; note = 2'-fluoroguanosine
  modified_base 12: mod_base = OTHER; note = 2'-O-methyladenosine
  modified_base 13: mod_base = cm
  modified_base 14: mod_base = OTHER; note = 2'-O-methyladenosine
  modified_base 15: mod_base = cm
  modified_base 16: mod_base = um
  modified_base 17: mod_base = um
  modified_base 18: mod_base = cm
  modified_base 19: mod_base = um
  modified_base 20: mod_base = um
  modified_base 21: mod_base = um
  source 1..21: mol_type = other RNA
gcaatcttaagacacttcttt

SEQ ID NO: 436 - RNA, 21 nt, synthetic construct
  modified_base 1: mod_base = gm
  modified_base 1^2: mod_base = OTHER; note = phosphorothioate linkage
  modified_base 2: mod_base = cm
  modified_base 3: mod_base = um
  modified_base 4: mod_base = gm
  modified_base 5: mod_base = OTHER; note = 2'-O-methyladenosine
  modified_base 6: mod_base = OTHER; note = 2'-O-methyladenosine
  modified_base 7: mod_base = OTHER; note = 2'-fluorouridine
  modified_base 8: mod_base = OTHER; note = 2'-O-methyladenosine
  modified_base 9: mod_base = OTHER; note = 2'-fluoroadenosine
  modified_base 10: mod_base = gm
  modified_base 11: mod_base = OTHER; note = 2'-fluorocytidine
  modified_base 12: mod_base = OTHER; note = 2'-O-methyladenosine
  modified_base 13: mod_base = um
  modified_base 14: mod_base = OTHER; note = 2'-O-methyladenosine
  modified_base 15: mod_base = um
  modified_base 16: mod_base = um
  modified_base 17: mod_base = gm
  modified_base 18: mod_base = OTHER; note = 2'-O-methyladenosine
  modified_base 19: mod_base = cm
  modified_base 20: mod_base = i
  modified_base 21: mod_base = OTHER; note = 2'-O-methyladenosine
  source 1..21: mol_type = other RNA
gctgaataagcatattgacna

SEQ ID NO: 437 - RNA, 21 nt, synthetic construct
  modified_base 1: mod_base = gm
  modified_base 1^2: mod_base = OTHER; note = phosphorothioate linkage
  modified_base 2: mod_base = um
  modified_base 3: mod_base = cm
  modified_base 4: mod_base = cm
  modified_base 5: mod_base = OTHER; note = 2'-O-methyladenosine
  modified_base 6: mod_base = OTHER; note = 2'-O-methyladenosine
  modified_base 7: mod_base = gm
  modified_base 8: mod_base = OTHER; note = 2'-O-methyladenosine
  modified_base 9: mod_base = OTHER; note = 2'-fluorouridine
  modified_base 10: mod_base = OTHER; note = 2'-fluoroguanosine
  modified_base 11: mod_base = OTHER; note = 2'-fluoroguanosine
  modified_base 12: mod_base = um
  modified_base 13: mod_base = OTHER; note = 2'-O-methyladenosine
  modified_base 14: mod_base = um
  modified_base 15: mod_base = um
  modified_base 16: mod_base = um
  modified_base 17: mod_base = cm
  modified_base 18: mod_base = um
  modified_base 19: mod_base = OTHER; note = 2'-O-methyladenosine
  modified_base 20: mod_base = cm
  modified_base 21: mod_base = OTHER; note = 2'-O-methyladenosine
  source 1..21: mol_type = other RNA
gtccaagatggtatttctaca

SEQ ID NO: 438 - RNA, 21 nt, synthetic construct
  modified_base 1: mod_base = cm
  modified_base 1^2: mod_base = OTHER; note = phosphorothioate linkage
  modified_base 2: mod_base = gm
  modified_base 3: mod_base = OTHER; note = 2'-O-methyladenosine
  modified_base 4: mod_base = OTHER; note = 2'-O-methyladenosine
  modified_base 5: mod_base = gm
  modified_base 6: mod_base = um
  modified_base 7: mod_base = OTHER; note = 2'-O-methyladenosine
  modified_base 8: mod_base = gm
  modified_base 9: mod_base = OTHER; note = 2'-fluorouridine
  modified_base 10: mod_base = gm
  modified_base 11: mod_base = OTHER; note = 2'-fluoroguanosine
  modified_base 12: mod_base = OTHER; note = 2'-O-methyladenosine
  modified_base 13: mod_base = OTHER; note = 2'-fluoroadenosine
  modified_base 14: mod_base = OTHER; note = 2'-O-methyladenosine
  modified_base 15: mod_base = OTHER; note = 2'-O-methyladenosine
  modified_base 16: mod_base = um
  modified_base 17: mod_base = cm
  modified_base 18: mod_base = cm
  modified_base 19: mod_base = um
  modified_base 20: mod_base = OTHER; note = 2'-O-methyladenosine
  modified_base 21: mod_base = OTHER; note = 2'-O-methyladenosine
  source 1..21: mol_type = other RNA
cgaagtagtggaaaatcctaa

SEQ ID NO: 439 - RNA, 21 nt, synthetic construct
  modified_base 1: mod_base = gm
  modified_base 1^2: mod_base = OTHER; note = phosphorothioate linkage
  modified_base 2: mod_base = gm
  modified_base 3: mod_base = OTHER; note = 2'-O-methyladenosine
  modified_base 4: mod_base = cm
  modified_base 5: mod_base = OTHER; note = 2'-O-methyladenosine
  modified_base 6: mod_base = OTHER; note = 2'-O-methyladenosine
  modified_base 7: mod_base = gm
  modified_base 8: mod_base = gm
  modified_base 9: mod_base = OTHER; note = 2'-fluoroadenosine
  modified_base 10: mod_base = OTHER; note = 2'-O-methyladenosine
  modified_base 11: mod_base = OTHER; note = 2'-fluorocytidine
  modified_base 12: mod_base = um
  modified_base 13: mod_base = OTHER; note = 2'-fluoroguanosine
  modified_base 14: mod_base = OTHER; note = 2'-O-methyladenosine
  modified_base 15: mod_base = um
  modified_base 16: mod_base = um
  modified_base 17: mod_base = OTHER; note = 2'-O-methyladenosine
  modified_base 18: mod_base = cm
  modified_base 19: mod_base = OTHER; note = 2'-O-methyladenosine
  modified_base 20: mod_base = OTHER; note = 2'-O-methyladenosine
  modified_base 21: mod_base = OTHER; note = 2'-O-methyladenosine
  source 1..21: mol_type = other RNA
ggacaaggaactgattacaaa

SEQ ID NO: 440 - RNA, 21 nt, synthetic construct
  modified_base 1: mod_base = um
  modified_base 1^2: mod_base = OTHER; note = phosphorothioate linkage
  modified_base 2: mod_base = gm
  modified_base 3: mod_base = cm
  modified_base 4: mod_base = um
  modified_base 5: mod_base = gm
  modified_base 6: mod_base = um
  modified_base 7: mod_base = gm
  modified_base 8: mod_base = gm
  modified_base 9: mod_base = OTHER; note = 2'-fluorouridine
  modified_base 10: mod_base = OTHER; note = 2'-fluorouridine
  modified_base 11: mod_base = OTHER; note = 2'-fluoroadenosine
  modified_base 12: mod_base = um
  modified_base 13: mod_base = OTHER; note = 2'-O-methyladenosine
  modified_base 14: mod_base = cm
  modified_base 15: mod_base = cm
  modified_base 16: mod_base = um
  modified_base 17: mod_base = OTHER; note = 2'-O-methyladenosine
  modified_base 18: mod_base = cm
  modified_base 19: mod_base = um
  modified_base 20: mod_base = OTHER; note = 2'-O-methyladenosine
  modified_base 21: mod_base = OTHER; note = 2'-O-methyladenosine
  source 1..21: mol_type = other RNA
tgctgtggttatacctactaa

SEQ ID NO: 441 - RNA, 21 nt, synthetic construct
  modified_base 1: mod_base = cm
  modified_base 1^2: mod_base = OTHER; note = phosphorothioate linkage
  modified_base 2: mod_base = OTHER; note = 2'-O-methyladenosine
  modified_base 3: mod_base = um
  modified_base 4: mod_base = OTHER; note = 2'-O-methyladenosine
  modified_base 5: mod_base = cm
  modified_base 6: mod_base = OTHER; note = 2'-O-methyladenosine
  modified_base 7: mod_base = OTHER; note = 2'-O-methyladenosine
  modified_base 8: mod_base = um
  modified_base 9: mod_base = OTHER; note = 2'-fluoroguanosine
  modified_base 10: mod_base = cm
  modified_base 11: mod_base = OTHER; note = 2'-fluorouridine
  modified_base 12: mod_base = OTHER; note = 2'-O-methyladenosine
  modified_base 13: mod_base = OTHER; note = 2'-fluoroguanosine
  modified_base 14: mod_base = um
  modified_base 15: mod_base = um
  modified_base 16: mod_base = OTHER; note = 2'-O-methyladenosine
  modified_base 17: mod_base = OTHER; note = 2'-O-methyladenosine
  modified_base 18: mod_base = OTHER; note = 2'-O-methyladenosine
  modified_base 19: mod_base = cm
  modified_base 20: mod_base = OTHER; note = 2'-O-methyladenosine
  modified_base 21: mod_base = OTHER; note = 2'-O-methyladenosine
  source 1..21: mol_type = other RNA
catacaatgctagttaaacaa

SEQ ID NO: 442 - RNA, 21 nt, synthetic construct
  modified_base 1: mod_base = cm
  modified_base 1^2: mod_base = OTHER; note = phosphorothioate linkage
  modified_base 2: mod_base = gm
  modified_base 3: mod_base = um
  modified_base 4: mod_base = OTHER; note = 2'-O-methyladenosine
  modified_base 5: mod_base = OTHER; note = 2'-O-methyladenosine
  modified_base 6: mod_base = um
  modified_base 7: mod_base = cm
  modified_base 8: mod_base = OTHER; note = 2'-O-methyladenosine
  modified_base 9: mod_base = OTHER; note = 2'-fluoroguanosine
  modified_base 10: mod_base = gm
  modified_base 11: mod_base = OTHER; note = 2'-fluoroadenosine
  modified_base 12: mod_base = um
  modified_base 13: mod_base = OTHER; note = 2'-fluoroguanosine
  modified_base 14: mod_base = um
  modified_base 15: mod_base = OTHER; note = 2'-O-methyladenosine
  modified_base 16: mod_base = OTHER; note = 2'-O-methyladenosine
  modified_base 17: mod_base = OTHER; note = 2'-O-methyladenosine
  modified_base 18: mod_base = cm
  modified_base 19: mod_base = um
  modified_base 20: mod_base = um
  modified_base 21: mod_base = OTHER; note = 2'-O-methyladenosine
  source 1..21: mol_type = other RNA
cgtaatcaggatgtaaactta

SEQ ID NO: 443 - RNA, 21 nt, synthetic construct
  modified_base 1: mod_base = um
  modified_base 1^2: mod_base = OTHER; note = phosphorothioate linkage
  modified_base 2: mod_base = gm
  modified_base 3: mod_base = cm
  modified_base 4: mod_base = um
  modified_base 5: mod_base = gm
  modified_base 6: mod_base = um
  modified_base 7: mod_base = gm
  modified_base 8: mod_base = gm
  modified_base 9: mod_base = OTHER; note = 2'-fluorouridine
  modified_base 10: mod_base = um
  modified_base 11: mod_base = OTHER; note = 2'-fluoroadenosine
  modified_base 12: mod_base = um
  modified_base 13: mod_base = OTHER; note = 2'-O-methyladenosine
  modified_base 14: mod_base = cm
  modified_base 15: mod_base = cm
  modified_base 16: mod_base = um
  modified_base 17: mod_base = OTHER; note = 2'-O-methyladenosine
  modified_base 18: mod_base = cm
  modified_base 19: mod_base = um
  modified_base 20: mod_base = OTHER; note = 2'-O-methyladenosine
  modified_base 21: mod_base = OTHER; note = 2'-O-methyladenosine
  source 1..21: mol_type = other RNA
tgctgtggttatacctactaa

SEQ ID NO: 444 - RNA, 21 nt, synthetic construct
  source 1..21: mol_type = other RNA
aaactgagttggacgtgtgtc

SEQ ID NO: 445 - RNA, 21 nt, synthetic construct
  source 1..21: mol_type = other RNA
tgattttccactacttcttcc

SEQ ID NO: 446 - RNA, 21 nt, synthetic construct
  source 1..21: mol_type = other RNA
ttaggattttccactacttcc

SEQ ID NO: 447 - RNA, 21 nt, synthetic construct
  source 1..21: mol_type = other RNA
aaaccaacactaccacatgac

SEQ ID NO: 448 - RNA, 21 nt, synthetic construct
  source 1..21: mol_type = other RNA
atacatttgggtcatagcttg

SEQ ID NO: 449 - RNA, 21 nt, synthetic construct
  source 1..21: mol_type = other RNA
tgatatatgtggtaccatgtc

SEQ ID NO: 450 - RNA, 21 nt, synthetic construct
  source 1..21: mol_type = other RNA
ttgatatatgtggtaccatgc

SEQ ID NO: 451 - RNA, 21 nt, synthetic construct
  source 1..21: mol_type = other RNA
tttacatcctgattatgtacc

SEQ ID NO: 452 - RNA, 21 nt, synthetic construct
  source 1..21: mol_type = other RNA
aagtttacatcctgattatgc

SEQ ID NO: 453 - RNA, 21 nt, synthetic construct
  source 1..21: mol_type = other RNA
taagtttacatcctgattatg

SEQ ID NO: 454 - RNA, 21 nt, synthetic construct
  source 1..21: mol_type = other RNA
tagctatgtaagtttacatcc

SEQ ID NO: 455 - RNA, 21 nt, synthetic construct
  source 1..21: mol_type = other RNA
ataataaagtctagccttacc

SEQ ID NO: 456 - RNA, 21 nt, synthetic construct
  source 1..21: mol_type = other RNA
ttactacagatagagacacca

SEQ ID NO: 457 - RNA, 21 nt, synthetic construct
  source 1..21: mol_type = other RNA
tatagtactacagatagagac

SEQ ID NO: 458 - RNA, 21 nt, synthetic construct
  source 1..21: mol_type = other RNA
tcatagtactacagatagagc

SEQ ID NO: 459 - RNA, 21 nt, synthetic construct
  source 1..21: mol_type = other RNA
tgtcatagtactacagatagc

SEQ ID NO: 460 - RNA, 21 nt, synthetic construct
  source 1..21: mol_type = other RNA
taatttgcaacattgctagac

SEQ ID NO: 461 - RNA, 21 nt, synthetic construct
  source 1..21: mol_type = other RNA
tcatcatagagatgagtcttc

SEQ ID NO: 462 - RNA, 21 nt, synthetic construct
  source 1..21: mol_type = other RNA
ttccaattaatgtgactccac

SEQ ID NO: 463 - RNA, 21 nt, synthetic construct
  source 1..21: mol_type = other RNA
tacataagttcgtactcatcc

SEQ ID NO: 464 - RNA, 21 nt, synthetic construct
  source 1..21: mol_type = other RNA
tgaatgagtacataagttcgt

SEQ ID NO: 465 - RNA, 21 nt, synthetic construct
  source 1..21: mol_type = other RNA
acgaatgagtacataagttcg

SEQ ID NO: 466 - RNA, 21 nt, synthetic construct
  source 1..21: mol_type = other RNA
tgaaacgaatgagtacataag

SEQ ID NO: 467 - RNA, 21 nt, synthetic construct
  source 1..21: mol_type = other RNA
aagaagtacgctattaactac

SEQ ID NO: 468 - RNA, 21 nt, synthetic construct
  source 1..21: mol_type = other RNA
aagaataccacgaaagcaagc

SEQ ID NO: 469 - RNA, 21 nt, synthetic construct
  source 1..21: mol_type = other RNA
tagtaaggatggctagtgtac

SEQ ID NO: 470 - RNA, 21 nt, synthetic construct
  source 1..21: mol_type = other RNA
ttaacaatattgcagcagtac

SEQ ID NO: 471 - RNA, 21 nt, synthetic construct
  source 1..21: mol_type = other RNA
acgttaacaatattgcagcag

SEQ ID NO: 472 - RNA, 21 nt, synthetic construct
  source 1..21: mol_type = other RNA
tacgttaacaatattgcagca

SEQ ID NO: 473 - RNA, 21 nt, synthetic construct
  source 1..21: mol_type = other RNA
tgtttagaccagaagatcagg

SEQ ID NO: 474 - RNA, 21 nt, synthetic construct
  source 1..21: mol_type = other RNA
aataagaaagcgttcgtgatg

SEQ ID NO: 475 - RNA, 21 nt, synthetic construct
  source 1..21: mol_type = other RNA
tttgtaataagaaagcgttcg

SEQ ID NO: 476 - RNA, 21 nt, synthetic construct
  source 1..21: mol_type = other RNA
tatctgttgtcacttactgtc

SEQ ID NO: 477 - RNA, 21 nt, synthetic construct
  source 1..21: mol_type = other RNA
aacatctgttgtcacttactg

SEQ ID NO: 478 - RNA, 21 nt, synthetic construct
  source 1..21: mol_type = other RNA
tgatctttgtcatccaatttg

SEQ ID NO: 479 - RNA, 21 nt, synthetic construct
  source 1..21: mol_type = other RNA
tattaaagattgctatgtgag

SEQ ID NO: 480 - RNA, 21 nt, synthetic construct
  source 1..21: mol_type = other RNA
ttgtctaacaacatcaaaagg

SEQ ID NO: 481 - RNA, 21 nt, synthetic construct
  source 1..21: mol_type = other RNA
tcttgatctaaagcattacca

SEQ ID NO: 482 - RNA, 21 nt, synthetic construct
  source 1..21: mol_type = other RNA
tgtttaactagcattgtatgc

SEQ ID NO: 483 - RNA, 21 nt, synthetic construct
  source 1..21: mol_type = other RNA
ttgtttaactagcattgtatg

SEQ ID NO: 484 - RNA, 21 nt, synthetic construct
  source 1..21: mol_type = other RNA
tctctatcagacattatgcac

SEQ ID NO: 485 - RNA, 21 nt, synthetic construct
  source 1..21: mol_type = other RNA
tcattaagatctgaatcgacc

SEQ ID NO: 486 - RNA, 21 nt, synthetic construct
  source 1..21: mol_type = other RNA
tccaatttggtcatctggacc

SEQ ID NO: 487 - RNA, 21 nt, synthetic construct
  source 1..21: mol_type = other RNA
tcaaattgtgcaatttgcggc

SEQ ID NO: 488 - RNA, 21 nt, synthetic construct
  source 1..21: mol_type = other RNA
tgaatgttttgtatgcgtcac

SEQ ID NO: 489 - RNA, 21 nt, synthetic construct
  source 1..21: mol_type = other RNA
tggaatttaaggtcttccttg

SEQ ID NO: 490 - RNA, 21 nt, synthetic construct
  source 1..21: mol_type = other RNA
tgctattggtgttaattggac

SEQ ID NO: 491 - RNA, 21 nt, synthetic construct
  source 1..21: mol_type = other RNA
agtagaaataccatcttggac

SEQ ID NO: 492 - RNA, 21 nt, synthetic construct
  source 1..21: mol_type = other RNA
tgtagtagaaataccatcttg

SEQ ID NO: 493 - RNA, 21 nt, synthetic construct
  source 1..21: mol_type = other RNA
ttgatcttttggtgtattcac

SEQ ID NO: 494 - RNA, 21 nt, synthetic construct
  source 1..21: mol_type = other RNA
tagcagatttcttagtgacag

SEQ ID NO: 495 - RNA, 21 nt, synthetic construct
  source 1..21: mol_type = other RNA
ttacattgtatgctttagtgg

SEQ ID NO: 496 - RNA, 21 nt, synthetic construct
  source 1..21: mol_type = other RNA
tgtaatcagttccttgtctgc

SEQ ID NO: 497 - RNA, 21 nt, synthetic construct
  source 1..21: mol_type = other RNA
tttgtaatcagttccttgtcc

SEQ ID NO: 498 - RNA, 21 nt, synthetic construct
  source 1..21: mol_type = other RNA
tcaatgtttgtaatcagttcc

SEQ ID NO: 499 - RNA, 21 nt, synthetic construct
  source 1..21: mol_type = other RNA
tcgtcaatatgcttattcagc

SEQ ID NO: 500 - RNA, 21 nt, synthetic construct
  source 1..21: mol_type = other RNA
tcataagcactcttaagaagc

SEQ ID NO: 501 - RNA, 21 nt, synthetic construct
  source 1..21: mol_type = other RNA
ttagataagacattgtctaag

SEQ ID NO: 502 - RNA, 21 nt, synthetic construct
  source 1..21: mol_type = other RNA
tatgaagattgccattaatgc

SEQ ID NO: 503 - RNA, 21 nt, synthetic construct
  source 1..21: mol_type = other RNA
aaacgtattaacgtaagcatc

SEQ ID NO: 504 - RNA, 21 nt, synthetic construct
  source 1..21: mol_type = other RNA
tcttaagattgtcaaaggtgc

SEQ ID NO: 505 - RNA, 21 nt, synthetic construct
  source 1..21: mol_type = other RNA
ttgattatctaatgtcagtac

SEQ ID NO: 506 - RNA, 21 nt, synthetic construct
  source 1..21: mol_type = other RNA
ttagtaggtataaccacagca

SEQ ID NO: 507 - RNA, 21 nt, synthetic construct
  source 1..21: mol_type = other RNA
aaagaagtgtcttaagattgc

SEQ ID NO: 508 - RNA, 21 nt, synthetic construct
  source 1..21: mol_type = other RNA
ttcataagcactcttaagaag

SEQ ID NO: 509 - RNA, 21 nt, synthetic construct
  source 1..21: mol_type = other RNA
tgtagaaataccatcttggac

SEQ ID NO: 510 - RNA, 21 nt, synthetic construct
  source 1..21: mol_type = other RNA
ttaggattttccactacttcg

SEQ ID NO: 511 - RNA, 21 nt, synthetic construct
  source 1..21: mol_type = other RNA
ttgtttaactagcattgtacg

SEQ ID NO: 512 - RNA, 21 nt, synthetic construct
  source 1..21: mol_type = other RNA
tttgtaatcagttccttgtcg

SEQ ID NO: 513 - RNA, 21 nt, synthetic construct
  source 1..21: mol_type = other RNA
taagtttacatcctgattacg

SEQ ID NO: 514 - RNA, 21 nt, synthetic construct
  source 1..21: mol_type = other RNA
aagaagtgtcttaagattgtc

SEQ ID NO: 515 - RNA, 21 nt, synthetic construct
  source 1..21: mol_type = other RNA
tcataagaaagtgtgcccatg

SEQ ID NO: 516 - RNA, 21 nt, synthetic construct
  source 1..21: mol_type = other RNA
taacttagggtcaatttctgt

SEQ ID NO: 517 - RNA, 21 nt, synthetic construct
  source 1..21: mol_type = other RNA
tcattaagatctgaatcgaca

SEQ ID NO: 518 - RNA, 21 nt, synthetic construct
  source 1..21: mol_type = other RNA
tttgtaatcagttccttgtct

SEQ ID NO: 519 - RNA, 21 nt, synthetic construct
  source 1..21: mol_type = other RNA
gacacacgtccaactcagttt

SEQ ID NO: 520 - RNA, 21 nt, synthetic construct
  source 1..21: mol_type = other RNA
ggaagaagtagtggaaaatca

SEQ ID NO: 521 - RNA, 21 nt, synthetic construct
  source 1..21: mol_type = other RNA
ggaagtagtggaaaatcctaa

SEQ ID NO: 522 - RNA, 21 nt, synthetic construct
  modified_base 17: mod_base = i
  source 1..21: mol_type = other RNA
gtcatgtggtagtgttngttt

SEQ ID NO: 523 - RNA, 21 nt, synthetic construct
  source 1..21: mol_type = other RNA
caagctatgacccaaatgtat

SEQ ID NO: 524 - RNA, 21 nt, synthetic construct
  source 1..21: mol_type = other RNA
gacatggtaccacatatatca

SEQ ID NO: 525 - RNA, 21 nt, synthetic construct
  source 1..21: mol_type = other RNA
gcatggtaccacatatatcaa

SEQ ID NO: 526 - RNA, 21 nt, synthetic construct
  source 1..21: mol_type = other RNA
ggtacataatcaggatgtaaa

SEQ ID NO: 527 - RNA, 21 nt, synthetic construct
  source 1..21: mol_type = other RNA
gcataatcaggatgtaaactt

SEQ ID NO: 528 - RNA, 21 nt, synthetic construct
  source 1..21: mol_type = other RNA
cataatcaggatgtaaactta

SEQ ID NO: 529 - RNA, 21 nt, synthetic construct
  source 1..21: mol_type = other RNA
ggatgtaaacttacatagcta

SEQ ID NO: 530 - RNA, 21 nt, synthetic construct
  source 1..21: mol_type = other RNA
ggtaaggctagactttattat

SEQ ID NO: 531 - RNA, 21 nt, synthetic construct
  source 1..21: mol_type = other RNA
tggtgtctctatctgtagtaa

SEQ ID NO: 532 - RNA, 21 nt, synthetic construct
  source 1..21: mol_type = other RNA
gtctctatctgtagtactata

SEQ ID NO: 533 - RNA, 21 nt, synthetic construct
  source 1..21: mol_type = other RNA
gctctatctgtagtactatga

SEQ ID NO: 534 - RNA, 21 nt, synthetic construct
  source 1..21: mol_type = other RNA
gctatctgtagtactatgaca

SEQ ID NO: 535 - RNA, 21 nt, synthetic construct
  source 1..21: mol_type = other RNA
gtctagcaatgttgcaaatta

SEQ ID NO: 536 - RNA, 21 nt, synthetic construct
  source 1..21: mol_type = other RNA
gaagactcatctctatgatga

SEQ ID NO: 537 - RNA, 21 nt, synthetic construct
  source 1..21: mol_type = other RNA
gtggagtcacattaattggaa

SEQ ID NO: 538 - RNA, 21 nt, synthetic construct
  source 1..21: mol_type = other RNA
ggatgagtacgaacttatgta

SEQ ID NO: 539 - RNA, 21 nt, synthetic construct
  source 1..21: mol_type = other RNA
acgaacttatgtactcattca

SEQ ID NO: 540 - RNA, 21 nt, synthetic construct
  source 1..21: mol_type = other RNA
cgaacttatgtactcattcgt

SEQ ID NO: 541 - RNA, 21 nt, synthetic construct
  source 1..21: mol_type = other RNA
cttatgtactcattcgtttca

SEQ ID NO: 542 - RNA, 21 nt, synthetic construct
  modified_base 16: mod_base = i
  source 1..21: mol_type = other RNA
cttatgtactcattcntttca

SEQ ID NO: 543 - RNA, 21 nt, synthetic construct
  source 1..21: mol_type = other RNA
gtagttaatagcgtacttctt

SEQ ID NO: 544 - RNA, 21 nt, synthetic construct
  source 1..21: mol_type = other RNA
gcttgctttcgtggtattctt

SEQ ID NO: 545 - RNA, 21 nt, synthetic construct
  source 1..21: mol_type = other RNA
gtacactagccatccttacta

SEQ ID NO: 546 - RNA, 21 nt, synthetic construct
  source 1..21: mol_type = other RNA
gtactgctgcaatattgttaa

SEQ ID NO: 547 - RNA, 21 nt, synthetic construct
  source 1..21: mol_type = other RNA
ctgctgcaatattgttaacgt

SEQ ID NO: 548 - RNA, 21 nt, synthetic construct
  source 1..21: mol_type = other RNA
tgctgcaatattgttaacgta

SEQ ID NO: 549 - RNA, 21 nt, synthetic construct
  source 1..21: mol_type = other RNA
cctgatcttctggtctaaaca

SEQ ID NO: 550 - RNA, 21 nt, synthetic construct
  source 1..21: mol_type = other RNA
catcacgaacgctttcttatt

SEQ ID NO: 551 - RNA, 21 nt, synthetic construct
  source 1..21: mol_type = other RNA
cgaacgctttcttattacaaa

SEQ ID NO: 552 - RNA, 21 nt, synthetic construct
  source 1..21: mol_type = other RNA
gacagtaagtgacaacagata

SEQ ID NO: 553 - RNA, 21 nt, synthetic construct
  source 1..21: mol_type = other RNA
cagtaagtgacaacagatgtt

SEQ ID NO: 554 - RNA, 21 nt, synthetic construct
  source 1..21: mol_type = other RNA
caaattggatgacaaagatca

SEQ ID NO: 555 - RNA, 21 nt, synthetic construct
  source 1..21: mol_type = other RNA
ctcacatagcaatctttaata

SEQ ID NO: 556 - RNA, 21 nt, synthetic construct
  source 1..21: mol_type = other RNA
ccttttgatgttgttagacaa

SEQ ID NO: 557 - RNA, 21 nt, synthetic construct
  source 1..21: mol_type = other RNA
tggtaatgctttagatcaaga

SEQ ID NO: 558 - RNA, 21 nt, synthetic construct
  source 1..21: mol_type = other RNA
gcatacaatgctagttaaaca

SEQ ID NO: 559 - RNA, 21 nt, synthetic construct
  source 1..21: mol_type = other RNA
catacaatgctagttaaacaa

SEQ ID NO: 560 - RNA, 21 nt, synthetic construct
  source 1..21: mol_type = other RNA
gtgcataatgtctgatagaga

SEQ ID NO: 561 - RNA, 21 nt, synthetic construct
  source 1..21: mol_type = other RNA
ggtcgattcagatcttaatga

SEQ ID NO: 562 - RNA, 21 nt, synthetic construct
  source 1..21: mol_type = other RNA
ggtccagatgaccaaattgga

SEQ ID NO: 563 - RNA, 21 nt, synthetic construct
  source 1..21: mol_type = other RNA
gccgcaaattgcacaatttga

SEQ ID NO: 564 - RNA, 21 nt, synthetic construct
  source 1..21: mol_type = other RNA
gtgacgcatacaaaacattca

SEQ ID NO: 565 - RNA, 21 nt, synthetic construct
  source 1..21: mol_type = other RNA
caaggaagaccttaaattcca

SEQ ID NO: 566 - RNA, 21 nt, synthetic construct
  source 1..21: mol_type = other RNA
gtccaattaacaccaatagca

SEQ ID NO: 567 - RNA, 21 nt, synthetic construct
  source 1..21: mol_type = other RNA
gtccaagatggtatttctact

SEQ ID NO: 568 - RNA, 21 nt, synthetic construct
  source 1..21: mol_type = other RNA
caagatggtatttctactaca

SEQ ID NO: 569 - RNA, 21 nt, synthetic construct
  source 1..21: mol_type = other RNA
gtgaatacaccaaaagatcaa

SEQ ID NO: 570 - RNA, 21 nt, synthetic construct
  modified_base 18: mod_base = i
  source 1..21: mol_type = other RNA
ctgtcactaagaaatctncta

SEQ ID NO: 571 - RNA, 21 nt, synthetic construct
  source 1..21: mol_type = other RNA
ccactaaagcatacaatgtaa

SEQ ID NO: 572 - RNA, 21 nt, synthetic construct
  source 1..21: mol_type = other RNA
gcagacaaggaactgattaca

SEQ ID NO: 573 - RNA, 21 nt, synthetic construct
  source 1..21: mol_type = other RNA
ggacaaggaactgattacaaa

SEQ ID NO: 574 - RNA, 21 nt, synthetic construct
  source 1..21: mol_type = other RNA
ggaactgattacaaacattga

SEQ ID NO: 575 - RNA, 21 nt, synthetic construct
  modified_base 20: mod_base = i
  source 1..21: mol_type = other RNA
gctgaataagcatattgacna

SEQ ID NO: 576 - RNA, 21 nt, synthetic construct
  source 1..21: mol_type = other RNA
gcttcttaagagtgcttatga

SEQ ID NO: 577 - RNA, 21 nt, synthetic construct
  source 1..21: mol_type = other RNA
cttagacaatgtcttatctaa

SEQ ID NO: 578 - RNA, 21 nt, synthetic construct
  source 1..21: mol_type = other RNA
gcattaatggcaatcttcata

SEQ ID NO: 579 - RNA, 21 nt, synthetic construct
  source 1..21: mol_type = other RNA
gatgcttacgttaatacgttt

SEQ ID NO: 580 - RNA, 21 nt, synthetic construct
  source 1..21: mol_type = other RNA
gcacctttgacaatcttaaga

SEQ ID NO: 581 - RNA, 21 nt, synthetic construct
  source 1..21: mol_type = other RNA
gtactgacattagataatcaa

SEQ ID NO: 582 - RNA, 21 nt, synthetic construct
  source 1..21: mol_type = other RNA
tgctgtggttatacctactaa

SEQ ID NO: 583 - RNA, 21 nt, synthetic construct
  source 1..21: mol_type = other RNA
gcaatcttaagacacttcttt

SEQ ID NO: 584 - RNA, 21 nt, synthetic construct
  source 1..21: mol_type = other RNA
cttcttaagagtgcttatgaa

SEQ ID NO: 585 - RNA, 21 nt, synthetic construct
  source 1..21: mol_type = other RNA
gtccaagatggtatttctaca

SEQ ID NO: 586 - RNA, 21 nt, synthetic construct
  source 1..21: mol_type = other RNA
cgaagtagtggaaaatcctaa

SEQ ID NO: 587 - RNA, 21 nt, synthetic construct
  source 1..21: mol_type = other RNA
cgtacaatgctagttaaacaa

SEQ ID NO: 588 - RNA, 21 nt, synthetic construct
  source 1..21: mol_type = other RNA
cgacaaggaactgattacaaa

SEQ ID NO: 589 - RNA, 21 nt, synthetic construct
  source 1..21: mol_type = other RNA
cgtaatcaggatgtaaactta

SEQ ID NO: 590 - RNA, 21 nt, synthetic construct
  source 1..21: mol_type = other RNA
gacaatcttaagacacttctt

SEQ ID NO: 591 - RNA, 21 nt, synthetic construct
  source 1..21: mol_type = other RNA
catgggcacactttcttatga

SEQ ID NO: 592 - RNA, 21 nt, synthetic construct
  source 1..21: mol_type = other RNA
acagaaattgaccctaagtta

SEQ ID NO: 593 - RNA, 21 nt, synthetic construct
  source 1..21: mol_type = other RNA
tgtcgattcagatcttaatga

SEQ ID NO: 594 - RNA, 21 nt, synthetic construct
  source 1..21: mol_type = other RNA
agacaaggaactgattacaaa

SEQ ID NO: 595 - RNA, 21 nt, synthetic construct
  source 1..21: mol_type = other RNA
  modified_base 2: mod_base = OTHER; note = 2-aminoadenosine nucleotide
cntaatcaggatgtaaactta

SEQ ID NO: 596 - RNA, 21 nt, synthetic construct
  source 1..21: mol_type = other RNA
  modified_base 20: mod_base = OTHER; note = 2-aminoadenosine nucleotide
ggtaaggctagactttattnt

SEQ ID NO: 597 - RNA, 21 nt, synthetic construct
  source 1..21: mol_type = other RNA
  modified_base 18: mod_base = OTHER; note = 2-aminoadenosine nucleotide
gtctagcaatgttgcaantta

SEQ ID NO: 598 - RNA, 21 nt, synthetic construct
  source 1..21: mol_type = other RNA
  modified_base 2: mod_base = OTHER; note = 2-aminoadenosine nucleotide
gnagactcatctctatgatga

SEQ ID NO: 599 - RNA, 21 nt, synthetic construct
  source 1..21: mol_type = other RNA
  modified_base 10: mod_base = OTHER; note = 2-aminoadenosine nucleotide
tgctgcaatnttgttaacgta

SEQ ID NO: 600 - RNA, 21 nt, synthetic construct
  source 1..21: mol_type = other RNA
  modified_base 19: mod_base = OTHER; note = 2-aminoadenosine nucleotide
catcacgaacgctttcttntt

SEQ ID NO: 601 - RNA, 21 nt, synthetic construct
  source 1..21: mol_type = other RNA
  modified_base 2: mod_base = OTHER; note = 2-aminoadenosine nucleotide
cnaattggatgacaaagatca

SEQ ID NO: 602 - RNA, 21 nt, synthetic construct
  source 1..21: mol_type = other RNA
  modified_base 19: mod_base = OTHER; note = 2-aminoadenosine nucleotide
ctcacatagcaatctttanta

SEQ ID NO: 603 - RNA, 21 nt, synthetic construct
  source 1..21: mol_type = other RNA
  modified_base 2: mod_base = OTHER; note = 2-aminoadenosine nucleotide
cntacaatgctagttaaacaa

SEQ ID NO: 604 - RNA, 21 nt, synthetic construct
  source 1..21: mol_type = other RNA
  modified_base 2: mod_base = OTHER; note = 2-aminoadenosine nucleotide
cnaggaagaccttaaattcca

SEQ ID NO: 605 - RNA, 21 nt, synthetic construct
  source 1..21: mol_type = other RNA
  modified_base 2: mod_base = OTHER; note = 2-aminoadenosine nucleotide
cnagatggtatttctactaca
